United States Patent Application Publication US 2015/0086982 A1 - sequence listing, part 2

SEQ ID NO: 34 - DNA, 4657536 bp, Podospora anserina S+ mat (residues 1,552,513-3,105,024 of 4,657,536)
  misc_feature (5979)..(6128): n is a, c, g, or t
  misc_feature (10388)..(10745): n is a, c, g, or t
  misc_feature (12025)..(12066): n is a, c, g, or t
  misc_feature (19150)..(19263): n is a, c, g, or t
  misc_feature (20294)..(20310): n is a, c, g, or t
  misc_feature (20622)..(20660): n is a, c, g, or t
  misc_feature (22070)..(22096): n is a, c, g, or t
  misc_feature (22346)..(22376): n is a, c, g, or t
  misc_feature (23427)..(23782): n is a, c, g, or t
  misc_feature (441648)..(442416): n is a, c, g, or t
  misc_feature (443511)..(445238): n is a, c, g, or t
  misc_feature (447109)..(447165): n is a, c, g, or t
  misc_feature (511365)..(511560): n is a, c, g, or t
  misc_feature (513553)..(513810): n is a, c, g, or t
  misc_feature (515916)..(516101): n is a, c, g, or t
  misc_feature (518341)..(518440): n is a, c, g, or t
  misc_feature (519756)..(520450): n is a, c, g, or t
  misc_feature (521964)..(523042): n is a, c, g, or t
  misc_feature (558685)..(558708): n is a, c, g, or t
  misc_feature (560073)..(560110): n is a, c, g, or t
  misc_feature (581622)..(581771): n is a, c, g, or t
  misc_feature (587762)..(587911): n is a, c, g, or t
  misc_feature (605885)..(606034): n is a, c, g, or t
  misc_feature (613192)..(613341): n is a, c, g, or t
  misc_feature (622411)..(622560): n is a, c, g, or t
  misc_feature (633743)..(633892): n is a, c, g, or t
  misc_feature (652067)..(652216): n is a, c, g, or t
  misc_feature (673489)..(673638): n is a, c, g, or t
  misc_feature (724985)..(725134): n is a, c, g, or t
  misc_feature (759502)..(759651): n is a, c, g, or t
  misc_feature (761346)..(761495): n is a, c, g, or t
  misc_feature (798726)..(799664): n is a, c, g, or t
  misc_feature (810776)..(810919): n is a, c, g, or t
  misc_feature (820266)..(820292): n is a, c, g, or t
  misc_feature (821912)..(821931): n is a, c, g, or t
  misc_feature (847571)..(847720): n is a, c, g, or t
  misc_feature (851454)..(851603): n is a, c, g, or t
  misc_feature (870192)..(870341): n is a, c, g, or t
  misc_feature (914046)..(914195): n is a, c, g, or t
  misc_feature (915963)..(916031): n is a, c, g, or t
  misc_feature (922575)..(922724): n is a, c, g, or t
  misc_feature (924227)..(924318): n is a, c, g, or t
  misc_feature (932796)..(933686): n is a, c, g, or t
  misc_feature (946696)..(946845): n is a, c, g, or t
  misc_feature (1074482)..(1074631): n is a, c, g, or t
  misc_feature (1084434)..(1084583): n is a, c, g, or t
  misc_feature (1102479)..(1102628): n is a, c, g, or t
  misc_feature (1108570)..(1108719): n is a, c, g, or t
  misc_feature (1113530)..(1113679): n is a, c, g, or t
  misc_feature (1116391)..(1116504): n is a, c, g, or t
  misc_feature (1133793)..(1133956): n is a, c, g, or t
  misc_feature (1159209)..(1159358): n is a, c, g, or t
  misc_feature (1183821)..(1183865): n is a, c, g, or t
  misc_feature (1207271)..(1207420): n is a, c, g, or t
  misc_feature (1252230)..(1252379): n is a, c, g, or t
  misc_feature (1255026)..(1255094): n is a, c, g, or t
  misc_feature (1256281)..(1256430): n is a, c, g, or t
  misc_feature (1259422)..(1259571): n is a, c, g, or t
  misc_feature (1266498)..(1266647): n is a, c, g, or t
  misc_feature (1288953)..(1289052): n is a, c, g, or t
  misc_feature (1291564)..(1291713): n is a, c, g, or t
  misc_feature (1314568)..(1314717): n is a, c, g, or t
  misc_feature (1326835)..(1327247): n is a, c, g, or t
  misc_feature (1352733)..(1352882): n is a, c, g, or t
  misc_feature (1367959)..(1368108): n is a, c, g, or t
  misc_feature (1451100)..(1451249): n is a, c, g, or t
  misc_feature (1546359)..(1546508): n is a, c, g, or t
  misc_feature (1556987)..(1557136): n is a, c, g, or t
  misc_feature (1825135)..(1836134): n is a, c, g, or t
  misc_feature (1899091)..(1899240): n is a, c, g, or t
  misc_feature (1901382)..(1901531): n is a, c, g, or t
  misc_feature (1928486)..(1928543): n is a, c, g, or t
  misc_feature (1938762)..(1938911): n is a, c, g, or t
  misc_feature (1948982)..(1949826): n is a, c, g, or t
  misc_feature (2036834)..(2036983): n is a, c, g, or t
  misc_feature (2066537)..(2066577): n is a, c, g, or t
  misc_feature (2068131)..(2068338): n is a, c, g, or t
  misc_feature (2099409)..(2099477): n is a, c, g, or t
  misc_feature (2101930)..(2102079): n is a, c, g, or t
  misc_feature (2103992)..(2104100): n is a, c, g, or t
  misc_feature (2110956)..(2111045): n is a, c, g, or t
  misc_feature (2112162)..(2112311): n is a, c, g, or t
  misc_feature (2137000)..(2137149): n is a, c, g, or t
  misc_feature (2144273)..(2144422): n is a, c, g, or t
  misc_feature (2151824)..(2151973): n is a, c, g, or t
  misc_feature (2186006)..(2186155): n is a, c, g, or t
  misc_feature (2189689)..(2189838): n is a, c, g, or t
  misc_feature (2211646)..(2213003): n is a, c, g, or t
  misc_feature (2234707)..(2234856): n is a, c, g, or t
  misc_feature (2259741)..(2259890): n is a, c, g, or t
  misc_feature (2319798)..(2320561): n is a, c, g, or t
  misc_feature (2323399)..(2323724): n is a, c, g, or t
  misc_feature (2419526)..(2419675): n is a, c, g, or t
  misc_feature (2671005)..(2671154): n is a, c, g, or t
  misc_feature (3021240)..(3021389): n is a, c, g, or t
  misc_feature (3040215)..(3040258): n is a, c, g, or t
  misc_feature (3041342)..(3041447): n is a, c, g, or t
  misc_feature (3056490)..(3056639): n is a, c, g, or t
  misc_feature (3068603)..(3068752): n is a, c, g, or t
  misc_feature (3131200)..(3131579): n is a, c, g, or t
  misc_feature (3136870)..(3137019): n is a, c, g, or t
  misc_feature (3138065)..(3139235): n is a, c, g, or t
  misc_feature (3145790)..(3145939): n is a, c, g, or t
  misc_feature (3163068)..(3163574): n is a, c, g, or t
  misc_feature (3191713)..(3191862): n is a, c, g, or t
  misc_feature (3335101)..(3335250): n is a, c, g, or t
  misc_feature (3338156)..(3338305): n is a, c, g, or t
  misc_feature (3377833)..(3377982): n is a, c, g, or t
  misc_feature (3424848)..(3424997): n is a, c, g, or t
  misc_feature (3439805)..(3439954): n is a, c, g, or t
  misc_feature (3448104)..(3448253): n is a, c, g, or t
  misc_feature (3464040)..(3464189): n is a, c, g, or t
  misc_feature (3603053)..(3603202): n is a, c, g, or t
  misc_feature (3747443)..(3747592): n is a, c, g, or t
  misc_feature (3788888)..(3789037): n is a, c, g, or t
  misc_feature (3818315)..(3818464): n is a, c, g, or t
  misc_feature (3823471)..(3823620): n is a, c, g, or t
  misc_feature (3846519)..(3846668): n is a, c, g, or t
  misc_feature (3853709)..(3853858): n is a, c, g, or t
  misc_feature (3861796)..(3861945): n is a, c, g, or t
  misc_feature (3872573)..(3872722): n is a, c, g, or t
  misc_feature (3896049)..(3896198): n is a, c, g, or t
  misc_feature (3913722)..(3913871): n is a, c, g, or t
  misc_feature (3926668)..(3926817): n is a, c, g, or t
  misc_feature (3934968)..(3935117): n is a, c, g, or t
  misc_feature (3951244)..(3951393): n is a, c, g, or t
  misc_feature (3982365)..(3982724): n is a, c, g, or t
  misc_feature (4019307)..(4019363): n is a, c, g, or t
  misc_feature (4024217)..(4024366): n is a, c, g, or t
  misc_feature (4051932)..(4051966): n is a, c, g, or t
  misc_feature (4055593)..(4055742): n is a, c, g, or t
  misc_feature (4061730)..(4061879): n is a, c, g, or t
  misc_feature (4066632)..(4066678): n is a, c, g, or t
  misc_feature (4095467)..(4095616): n is a, c, g, or t
  misc_feature (4105134)..(4105655): n is a, c, g, or t
  misc_feature (4111701)..(4111850): n is a, c, g, or t
  misc_feature (4214761)..(4214781): n is a, c, g, or t
  misc_feature (4329412)..(4329561): n is a, c, g, or t
  misc_feature (4399393)..(4400413): n is a, c, g, or t
  misc_feature (4400797)..(4402078): n is a, c, g, or t
  misc_feature (4417332)..(4417481): n is a, c, g, or t
  misc_feature (4446312)..(4446461): n is a, c, g, or t
  misc_feature (4646252)..(4646401): n is a, c, g, or t
gcacagacatcgaagacttctagaaaaggctgcccagtgtcaggcagctgaggaaaggttgttgcggaacagacgcaggggcacgacgcattttcccaggcttttttatgaatgcggaaggtctctggcggtagaaaaaggagggagggccccattctcccgcatgtcacctttggttccttggatgccgcaagcgagacggcgttccggtgctcctggaacaaaggcccccattgccaaaacaggtcccctgagtttgggcggggcccattacgcccatcccctagcccccctgcttgacgctggtcccgtcgctggcgaaaaagtttctaccaaagatggagttcctttcaggttatgctgcggctcaatcccctttctccgcctacaccgtcgagccgcctcctaattcctcccatcgctcccgttccaagcagcctggccgatccaactcgacctcgggcacccagacgaagaagcgctctcgcatacacggacacgcccgtactaacagcgccagcacctcgagcacgggcagcggccggaccggcgatagcaaccagcagccatcgcatccaggtcaccaccacggcaccgccaccgccgccactagcaacaacaacatcaacaacaaccctgcgtggttgcagcactccggcgctcccgacgccgccagacccggagttgatgccgccgccgcatctcctgctgctgtgacagcacccccgttcggcgcccgccgtgatcgacaccgcgagcgcatgtcctaccaggacaagcagctaccagcaaccccccgcctcaacaccgtcgacgcctcttcgcgatcaccgggcagcggtagcacttctgagccagcttcggcacaaacaccagcttccgcctcggccgccttctcagaccgacgcatgctccatcatgcagcagcagccatgtacgatccaggatccaaaccacctgggccgggaccagcaggtctcccccgctccgaaagcgtcaccagcgtcgggggaataaccacggcgagcgggcgcaccatgatctccaccgagccaccatccagccaagaagccgccgctcaccagctcaggccgtttgtcgtccgcaacggccggacgtacatctcggaccagtccctcccttacccattacccgtcgacctggaggagctacacaggcagggtctaaagacgatgcttttactacaattatacggacgacctatttgcgatccgacattcatcaacaaaccgccgccgcgcatcctggaaattgggtgcgggacaggattttggagcatgacttgctaccgctactacgaagccagaggccagcacgcaaacatgtcttttaccgggcttgatattgtccctcttgcgcctcccacgggagggccaggggtttctgagagtgccgagtcggccccttccgctttgcctggggcgtcagctatcaggccggataaagacatgaattggacttttgtacaacacgatctgaggaaactgccgttaccctttcctgaggggtcgtttgactttgtcatggtgaaggacatgggccttgctacgtcgatggtgatgcaacagggtctggtagacgagtatattcgggtgttggtgcctggtggaacggtggagatatgggagactgatcatacacttcgtatgctccgccctcatgtgccggagccacctgctggatcaggtggcgctgagggtgaagcggaggctggtggtgaggctgagaatgggaatgacgagcagaatataatggagatgggggcgtatctcatgacggccaatacgccgctcagccatcctcttaataacttcttgttggaatataatgggtggatatctcgcgcattggaggcgagagggctgttttgcatgccttgtacggttattgggccgttgttgattcaagaagcggaggtcttgactggagtagggagcacgaggttggcgattcctttgtcggaagttcgatgggaaagggaaggggttggcggtgtggttaccaaggatgggaagagctatatcgatacgaaggcgaggaggctagggaaggatggtgcgcccgtgggcaaggcgctagggccggtggcgacggcggtcaggaggacagcgttgacggtggtggtgcagcagatccagagcatggagcatgtcctgagggaggtgagcgggaagagccaggatgagtgggatgcctggatggggaagatgatgaatgatctggtgagagaaaatggcccgagttggggagagtgcctcgaggttggtgcttggtgggcgaagaagaggtgatttttttgctttggtctcttttgatggcgggtttctaaaagggattttcttttgtttattatttggtcccgaactttaccgtcttgggaagtcgagctggctatgggtttcttggatatgtttttttttctcttcttcgaattggatataccttcaggtgtgaatgactatatatttttctgtttgatgtctaaaactactgttctggggttctgttgttggccgttctcttcggaagtgtatttttgctacaagctggcatgttttccgttactatccatttcttttgtacgatgtagggtatcaagcagaattccaaatcgctatgcgccatcataccgcttcctgagagtccggtatcgttttagatagtatctgtgttatgttttggttattgtggtcaggatagtcttggagtttggggacttacagtgcttcaatctctattgatcataaacaggattgaacttctcgttagcttttctctcccatgactgattcaatgttgttatatttacccttctgaacaaactgcgcccgcgcaatggcttgacgtatctccgcttcatccgtcaggctagcattggccataaaggccctgtgtaggcgagggcggaagtagttgtatccctgagggtaatcacggccgaggtacaagagctctactgacagcatgaatacgagaatttggcgtgatacacgggaggggctcgaagtacatacgcttgtaaattgacatgacttgctgtctcagctctgggtttattgaggacattgtttccgacgctgagttgaatgaggaattattgtgggatacacatgttcctctactctcatgagccaaccgaggttgcgaattatgtactctgttcgggccaacaccagacagtacgtgtaattgatgatactttcacgcggagttgagaccacctggataagcgcctggtgacgacattctcgtcccaccaccgcggcattgcttatcttatcgcacataccagcagtgcgcgcagcagaggcccgcactgtctctctcggccgtccagtcagcgtgaagctaaccacagcctggactgtctgagattctagccaggcggcgtgttttactttagccaaggctattgacagacatatatgcccaatttcacaatatatagacttttctggacaaatttgagaataacagctctaaagagacggttggcatcggccgagatcaacatgtccagaaaggcaccccacctttcttcccccgctgccgagacgtctccgagcccccggacaggacgggaattcccaaagagctcaagggcaatggcgacagccaggacaactgacagctaaacctgtcacggccgtgacatcttgagtccatctggaagaagtttgacatctcaaaggcgcaattgggacaattgaaaagagagtgaacacctcactttcacaaaccgatctcacccactcacaattgcatcatccgtccaaccacacaacaccgcacggctcaacataaccgcctcgatatcacctcctgaagtctcacaacaacgaccaccacaatgacccccccaacgcccctcctcaccagatccctccgatcaaggggcttactctcccttccgtccttcaccaaaaccctacaaagacccctctctaccatcaccaaccaactcccccctccaccaccaaaacactggatccccgacctccgcgcccgcctaggcaaatgcatcatcttcggctgcacccactcccaaatcacccgcgcgtcctccgttctcaaagccctatcaaccgaatggaagtctcttgtcgccggcagtgaagggttcctcaccgggggaaggagagggctagacgggaggcagattgcctggggggagatggatagttttgtttgttcccccccccactcattttcagtttgggcggggtggtggtgatactgacaaatgagagccaaacagcaacacgtcaacaatgtgaattactatcggtatgccgagtcggcaagagtaaactggatcaccaactttgccgttcatgttaatccgaaacataggcagcattgggcggaactgatgacgccccagtcgaccgggttaattaagaaaagtttgaagtgggatttcaagttttgtaagctttccccccccccccccnnnnnnnnnnnnnnnnnnnnnnnnnnnnnnnnnnnnnnnnnnnnnnnnnnnnnnnnnnnnnnnnnnnnnnnnnnnnnnnnnnnnnnnnnnnnnnnnnnnnnnnnnnnnnnnnnnnnnnnnnnnnnnnnnnnnnnnnnnnnnnnnnnnnnnctgaaaaatgtttactcaaatgatatctttttatatattatatcccccctcccccgccccgccccgccccgccccctgacagtccccaatacatgaaggatgagagttgacagagaaaacaaagccaatggtttaccctgataagatctccgtctatcacaagctccgctgcaggcctgagggggacccggcgccgagtaatttcatgctggattgtatcgtcttgtctcatcagcatagaagggtggcggcacgcttggaggaggatatcgttgtttatgactacaaggctgcgaaaaagacgagcatgcctgggtttatgatggagttgttccagcagacgtgggagatgcagcaggctgaggaggtgagggcgaggacgaggatttgggagttgattggggaggtggaggggttggagaaggagacgtgggatagggaggatgcggtagaggatttggggagtgctggtaagagtagtgcttgaaaaggttgagcatggaagtctaaatatcagggttcatggtgtggcgggttctccttttctttttctcttctatgatgggtggtccctgtgttttgatagacaatcacacaatatcaatatgactgtagaagccaagaatagaaaatgcttgttattcaaatggttcgccgcggaaaagcttgatgaataggaggtgtcaagtctaaagtccgggatatctgggacagaacggctcaccatcccggcccgggctccgaagctgcaaactcggagtttcccgaagacttcactgtcgccttccgcagttggaaggtctcgacctggacaaaagttcagcctcgcataatgccaatttggacgacactgcttggcagcacagtgtttgcggggtatggctccgtcgagcaccgtgtcaggagtatttctgacaccttaccttctgacgacaaccagctcggatgaggtttgtttgactggttttgataccggtagctttgtcgtctgagaaagggtccggagcggggtgcgtgcttggaggttcgggagaaacactggagttgatccctcccaacgaagcgtgattggtacgggtgaatccttgctcgcctgacctgcccatgctgaccctgtgatgcttgccacagggcggccgtataacactcccgatgttataggccaaggatggcttgatatcacaggccaaaaaaaaagcacatgaaagcaaaaagcagaaaacgccgagcaaaccgatatttttggtaccaaccaggcttggagttggcagcgagaacatgttcacgattccgatcaagctggctgtttgacgatcgcgtggtcctgtgccaaagcggagaaggtgtgggaaacgaaaaaatgcagcatccaccagacagcaaggaacccttggagatttggctgcgactttttgcttgtggtccacccaagaagtgacagaccccaaacggtcatgtccaatcataacgggcgggaaaagaccagaagagagaagggcgagtcgggcacctctgcatgcactgtgatggccaagagatcgcctgccaagcgacatcccgtggcttgttctggtggttgttttgcggagagtccccctattgaaccactggaacgacgatagtggcaggttctttgatgctgaggtagcctaattttcccttttcgagtcgggtgcaggttggggtgagctcgatatcccgagtctgcatttcctgactcctagaccagcctatcccaccatctaaatgtcgtgcaactgccggcacggagaggatcaccactcggccgcaaggagcttattctcgcgggatgacttgcggtgtgggggatggaaggaagctgggtgtcatcgttcggcttctccctgctgccataggctgccaccatgaggtccttcggtatggcgaggaggggaaggggctcatggtgtgagcggtttggatatctcacccagagatgtggaagttgatacacgtgctatgaggtcccatatgccctctgtgcccgctattcaccaacagttgaccgcaacatgtttggtgtcgggaagacagattaaatcgatattggctgcaggaagaggtcgagatgcagatgcctgtggtccggcaacgcaccgcgggtagcgcatggcgaccgacatcgtaattgcgatgccaccgtttcctactgcctctagttctatcagcacttctaacacctaggcacccgattaactcatgtccacctaacggctgctgcagggaaggtagtgatgcgtaagctgaagcggcgcatacagcaaagtcatcaaacagcgaaatctgagcataagtcagcgatcaagtaactcccacagcaccacggtaatggatgaagcaaaagcgctgatgaaagagattccaagctcaaagatttcagcgactcgctctttttgatataaatacaaggcagccccaccacaatccaccaaagccgtcgccacacccggcaaaccccctgtcatctcgcccaggtcctgccgtcctggagcggtccaagcgatagccactgggctgacactgtgcgcccacctaaaatcctcagcctccaaatccaaaatccgcttttctccttttaaactcaaaactcaacctgcgtccagccaacacccgaacttcgcagcagaggaaacacttacaaacgtctcaccacatgccacatacctcaccccgccccgccccgcttcactaacaacaacacattcttgaccacaacccccctcccgcgtgcgcatgacgacctgcaccaccccgaggaccctgaaagagtgcggaccggaactggccgcgacgctattcccggcctctgcctagcctttgcgacaacctcccctctcgcggccgtggcggacgagtggaggacttggttttggggacacttgggatttgaaggaaacgttttgcggatccagccgcctctcaatcgcctttccgctgctgggcatactgggctggctcagaacaagattctgggtcagcggatgcgtatgcctcgcgccgccaattcaggaaagcgacagcagggagcaagcaaccagcgtgataccaggcatgagaatggcctggtaggtccggggaagcgtgtggtcaagcagaagagccagaaccagctcgatggcatctccaagccaaccgttgacgctgcctccgtgccgcctctgccactgcaagtcaacaacaacaacaccaccaccaccaccaccaccaccaccaccaccgctgccccgccccatcccgacgacatggctcccgaacaccggacaaccgagatgctccgcaggggctcactagatgcctactctgaatcttcgtctgccgactcgctccctgctgccgtcagcctgcccatccccgacgagggtcaccgtcagatcaatgtgaacgatgccaagaatacaaacgtccaccgcgaccccggcttgatggagctcgccatcacggtccttcgcgcatgccctcttcaggacaccattgctatcctcatcattctcatgcaggcttcacccgctgtcttggcaaccatctatactttgtttacgcttcttacttttgtgccacccgtaaccaccagttccggtctcagcatcgccgagattttcgacggcagtcaaggaacgccttctctgacgaccctggttggaatggatgtggtcatgttgggcatctggctcttcttgtgggcacccatgcagcagttcatcttggatctcgctcaagttgtgatcgccttgaccttgggcggcggtggcacttcgaggcaaggcaccacgagcaatattctcttttgcgtggccatggtaggaatgtctcagtggacacggcacgcccggtggagtggtttgtcgcgactgagctcggtgttgggttcccatcgcttcctgatggctgattcagattcaaatatgcgtgcattcgagaagaagggccctgatgggtggcttcgaaatattttgggtattcacattctgactcagggtctggtgcgatacatccgggaatggtacctgcggagggaacgtcgtgatttgcagctccagagcctagcagaccccgaagccggaaagtccgtttcttttacggccgagggttcctcagatgctgccctcatggccgccgacagcgatgctcacctacaaaccagcgcaggaaatatttcgaccaagaaacgcaggaagcaaagtgctctcgtccggatcaggcagcctctctgggcggctctagctagtaccaagattgttatggtgaaggagtatgagctttcccacgccgcctcggaatcaaccagttcgaacgccaccgatatccacaacctgggcaatgcccccttcaacaagcagcctgagaagatctggatctgctatgtgggttgcgacgaggtctgcttcaacaccagtcatttccctgatccattgagtgaagacgaggcatccgaggacgagagccatccaggcatcgatatgagtaaaccgttctatgtcagggtcaacaaagctatttggcaaccaacccgaatgatgccaatcgaaatcggcgaggaggaaaagcaacaagggacgtgctggacaggcgatatctacggacttacgccgctctccaactacgagtgcgaattcgtcagcactcgtactggtgaggtcattttctcaaccagtgtcagaaccattcaggccaagagcaaggatctcgaagtagcatccaaaaccaccggcaatcaacgatcgcatgcccgccacgactcgcccgccacgactcttagggcatccattgctgcagctgaagcgaaattggccgatgaaaaggcccgtctcaagtctgtaaaaaaggacaacaaccgaaagctgaatgccctgcgaaaagagatcgagaagttgtcctcagctgtacagtcggctggtggagatgacgagaaactaagacagaaggtggcgcaaaacaaggtccaggagaagcgagccgaagagtccatcaatgagcttgacgcggagctcaaggagttggaggcattgcccgaggagctgctgaatgagtatcgggccaagcaaagtgcctggacatcagagaaggcccagtttgacaaggcccgctcctccttcaagagctggaaggcgtccattgacaaggagttgaagttgttggaagaggaaagggctagcttacaggccaagcgcaataagatcgcgacacgtatcgccaaggtcgatgatgaacatgctcgcatcacggatgccaatgctcgggggctgaacgaggcagagcgtcgccggcaggagcgcgctgccctcgaggctgatatggcccgcacggagcagcatctcagggatcgcatccagacgcttcgtgctggtaatatcaccaagcaggcgcaaatccacgacctgaacacccagttggaagtttacatggcaagctttcaagacgacctggcttacgacacaggagcggtgccgggtcatttccaaccctctgcacagtggggtccgccgccagctcctgttccctacaacgctcatgcccatgcgcatgctcaacctcagcctatgtggccgccgacctccatggccggccctgctccttctcttcttccgccttcgcacctgtctgcgtatcccagtccgatcggaccggtagccaatccacctcacgccaagaccagaggtcgctcgtcgtccatgttgagcgatgtttcaggcttcactcagtcgacggaggagcttgaccgtgagttcaacagcaatgtaggagttatcgggcacccccacctccacgccaaccatcattcctacgggacatcaggatcaacgagtttgcgaggcccacctggcttccacatttcgcggcagcgaagtgacggccccggtgttggatcaggctcggggtctgggtctggatccggcttcggctccggcagcagtagcgtgcggtcggggatgagtggtggaagcgtcaaggaagcccccagccctgcgtaactgccgggttgtttcgaagatgaaagtggatgtcaggccttttttcactgatgtccgtctttgttgactcggttggctttctttggatatgcgcgtttcttcacaactgtactcggcattgctcctgcgttggttggacacttcatggctgaatatctggcggttgtgtgtgtgcttggcctggcttctctttttgtggggtgggcatgtattctcatcagcgaaacatagcgggtgtgtatgtgcctacctttggggctcttgcttggctacctccgtagatagattggatgttttcagcgttggatcaaatgcgaaaaagtttggctttgatacctgtgtgtgtgtgtgtgtgttttgtctgatatttttctcgtcccaaatttgagagcaggcggtgtcatgtaggaaagttttggaccaagtccgttagggttacgccagtgaagtggctcgtggaacatgcggtttggcaaccggtggcttttgtcatctcaaggttttacgaaacgctttcgcttgtgtcatgaggctttactgtacacagctggtacctactgggacggcggaattgaccttgggcggtgcactgtctaagtgatgtcttggggctggccaactgtggataggtattgatgccatatcgataatgcttgtccatagactccatactgccgtgatctctcgccgacgttggcttgagtccccccccggaaaaccatcaaattacccaaaggcttccagactcatggaagttggatcaggcttgtggttggtgcagtgtatgtagatcgatcatatgcatcttggcacgcccagccatcctcggcattccttacacaaatgcgggaagaaagcgtatcgtatccgtacctgctgttccaaactcctgctaatctgtcaagttgcgtcaatatatgcaagatgacaccgaattgggttgggtatgtgtacactagttcttgttgactgctggtgttgggtgattggtttgtggtacgttgtgccatatccgtagcttccgtcaaagtgggcaagggggctggatggctaggctgtcaggggtttttgttgttgttttaccccgcaaaataatgctggaggattctgcggggaagaagacgggacaaagaagtctttcgaggagacaaaaagggcgctaggcttggaacaggggtgtgcccgagaagttgatcgtgatggttgcttgctggctgcaggaacgggtggttgaagatgcaggtttttttggggagggagatggggatgaatgacatgtggtatgtgggagtgaagattaagatggtacttgatttggggtaggaagaacagagatgttacggggaacaaatgttgacagcagaacttgacagcttcggtgtgagggtgagtcgagtctcttggcatcgttgctcggttccagtcttgtacaaacaaatcggtccatctacatgaccttcttgttggctctgcccagctgatgagagagtatttcctacactacgtactgtcgtgtcgggacatatcaaccaccaatgaaggtcaccgtccaactgcccatgttctttcacctgggtgtggggcgtttaactttctgaggtcccatgtaacggcgtgaacgaccacatccaatgacacttccaggttttccttcctgaatatcaaccgcccccgagatctcatctcttacacctgacctgcgcaagcgtcttatttggcaggctcaaattatagcgagatccatgcggttctcaaagaaaacaatctaaatggcatgataggaaatgaagattggcgatgttaaaccccaaatcgagaagctatctcctagccgtgaactcctgcatgctgctttgattcctagtgcctcttctctctgtcaacgaaaggtgtgtgcaacaagaccaggtgggggtgtatgccgaggctcttgttccccctcaatcatatgcaacgacgttccactttccccggattttttcccaacacaacgtgaacacacagatttcctttccccggatggcgggttccattccgtggcgacatgctctcccgccgtggaaattcacgacgtcggtcaagaccctaagcccggtttctcatgccttggcctgccgaaagaggtgttgatggaagactgacccaccatcttcttcccattgattgagggaggaggatggatgtgtgtgtgaatacgaaccaatgggggggtatacccaagacttcttgaccccgaaagctggcggctggatctgccattgttgagagcgagcatgaaagtggatggtgcctggtgtagtgtgcgggtgaagggaccctgtcaagctgggagaaccaagaggcaagaccgcctcccgtctccaaatcaccctccctcaagccagagtgagtggtataaatccagactcttcctccgcctgtcactttaccttagcctctccccccttcttcaccgaccatcgtgttccactgtacttcactcgctctcaagtacatacaacaaacaccgtcgacactcgttcgtcaagaaactaccaaacccaacaccaactaatacttaatatccaccccccaaccttcaaaatgaagtacaccgctgccctcctcgccctcgcggccgccgtctccgcccaggacatctccatcttccccgagtgctccctcgactgcatcatcagcggcatcggctccggcacctcctgcgagctgaccgacttcgcctgcgtctgcgagaacacccagtccctcatcacctcggccaccccttgcgttctcgaagcctgcggtgccgatgttgctctcagtacgcccccttcccctattcccatccctccccccttactaaccttctctcccagacgaggtcctccccgcagtcgacgagttctgcgccggcgttggcggtggcgacgatgacgcccctgccgaggacgacgagcccagcgtcactgccacccccgcccctgagcccaccgacgctcccgccgaggatgatgacgacgaggacgacgaggacgtcgagccaacccctaccggctccttcgtttccaacatcacccctgcccccaccagcaacaccaccatcccccctcccgttgaggagaccaccacccctcctcccgtcactgctggcgccgccgctgttggatacattggctctttgggcatgctcgctctcggtgccattgctgctctctaaatgacgtttctcataacctggagtggttagcgaccgtacaagcacggggggggatacaaaatgtaccaatatcatcttgtctcgagagagaaaggctgtactgtacatatctagttggctagataatgaagtacaatggaacatgcaaccgcagcacattaccacctgagggtgaaagaagtatatatgcctcatctctctacataaacgactggaaaactaaagatgatcaaaaaccgccaaacaataaaaagtgactagtgatataaacgggccttgtgataaaatagacaccatacaaatgcaattcatcccccgactgactgttgttgccccatgctgtgcctactcacctcaaacatatataccccttctttcaagtatacctcacctcatcaaacaacccagccctcacctgcaccacgctcgccatctcaaacaaaaagctctgcagcagcaccacattcgtcagcacatgtgataccgacaccgtcttctcctccacgacggtccccgcatccgtctccccgtcctcagacggtgccaacaatgcatcctccccgcctccttcaccttcaccttcagcgtcatcagatgcatcctccccgccctccgcagagtcggccgagacaatagctggtttcctatcatagctcaatgtaattggctccactggcggcttgacctccgggattccaatcctcctcgccaagatactctgatcaatcgcctggaaagccttggcttgcgagttgaggatatcgccccggttatcccacgatataggcgccggggcacttgctacgctggtgggcgagaaggaccggttggggataggtgtccggagaagcgtggcatcgttcatcggtacaacccgttctgaagccacccgtctggtctccttcctgccacggggactgcctgagcgactgggtgtaccgagctcagacaatatgcgctgggcaaacacctcgaggccagaaggtcgctccctagatgggttgcgagcctcgtcaaacatgcccttttcaatggacggtgtgcccgcgactgtcggtgcttgggaagacggggttctagcccgggacggggtaggaataggaggagcgtgatcagcaatctggaaagcctctcggcgttgctgaagcaggtcatcaaatcgtggaacttgctcccggtatgcctcaacctggtcgcaaagaagctggagaaccttgagcaagcggggaaggcttgactggttccacttgggacgccgccggcactccttcagctgctgcatttggacgtattcggcgtattcctgggactcgggatccagggacgggtcaggaagaggcagctcctcgtcttcctcgtcatcctcgtcgaaatggtagctttgtgggcttctcaagaaccacccttctagatgcatgtagccgcacacagcaaggtcgataacggcttccgtcaggcataggttggtttctaccgggttggtgaaaaacgtttcgagccggtcaagcattatgtttagtagagggtcttctgggcgaagggtatgtgatcggacgctccgaggtgcactgggaagactgtctggcacggcgggtaattggtggttatttgatgaagtcttgggcgtgatcaacggcgttgagcaggggtggttttctacacgtcccaatgtgtccctgagtaggttctcgtagagctcgttaaaagcgtcatcgccgccaatggtaccagccagtgccatcagatagtcaatttcttgcgcctgggctccggctgttcggtggtgagactcatcgagcacaccttctgtgtcgaggagtgtggtgactgcgtatcggtgatgtctcttaagaatcgtcgatacaagttggagagtcacatgaacagtttgatgattctgagaacggagacaggcgcgtataaggtcaacaaggttgaagagcaaggggtcagctgcctcctcgcttttggaggccatcatggtagccaggtccagtgatttacgtttccgagcagcgctgacaatgtcgccagaatcagcaggggcgggcgatacaacgtcgggtaaagcaagaaggtagtgaagaatgaggttgatcatgtcgggatgatcgacagattccaaaatgcggcgaagataagtcaagacggccaccgacgagccaccgtccacatcagaagactcaagcagcgaagggtatctgcgatatatcagcaaagttcatacgactgaccattgggccgaagagaacttacaaaagttgctgcagaaagatgacttggaagtgctccaacaaggtcgatttgacttcgacagacttacaatgattcagaacatcctgccagaagagcagatgggagagaaatgtgtccacatgagataaaaactcgggtgagcaggagctcacaatctcgtagtttgatttcggatgttcgtagtcagataatgcaagacaagggggcacttcgttgcttgggtggtcaatcacgagcttgcggctcagttgactatacagagcgcccaatcccgtggccatgagcgttgacaaatcgctctcgacaatccactgttcgagcagaaccgagcttgatgccgcttcgatgatataaagcaggccggtcctggcaaagtcacccaccttgccctcatgatggatgtagtccatcaacagataaaagagggggaagtcctgtttttgggtcttccccgtgaacttatcatggccgtcaacatgtttggcatcatgtggaccgtggtggtgggacttgaaccaggcgggcagtatctcgggattcagacggatcttagtcgtgatgttgaaagccagttcaacgatacgggcctcaatctcggcactgaggcgtatgctgtttgcgccagttatgcgcaccagcaggttcgtcaagctgccggagaagttgtcgttctccacaaaggcttcctcctcgctttcgatcagcgtcgcgaagaagagcactgcctccttgatgatccattcgttgtaggagctggtggcgattttggccaccgggatataaacttgctttgcagcagcaaaggaaatacatggatgtgggaggggacgtctggactcgtcactgaggagacttgtcaattcttgaagtctgatctcgatttgttcggcggcttcatcatcgtgggcgaggttggaggagtgacgccatgtgtgctaattataggacatgatcagaaacgatgccccgatctattcatagcagaccttggggagtctcaccaatagctgactgtattccttctcgaaacggtgtaggcgacgggcaggatcctttgcgaagtccttccgggagcttgccgacgacagcggcgtgtgtgctaggaggcgcgaccactgtagatggggagttagggggagacctggttccggtcctggggcggtcacggcttacaaaatccatggtctgtttggctgcatctcgagcacaactcgaagcagcgcagacggcgttatctcgttgaacgactgatgtccagttgcatgaagaggtgctgttccagatgtcttgtcgcgaaattgattagattagccgtttggcctcgcctgacgtccaccggccggcagctgcagcgctgagtgagcacgggcggctttttcaggggtgccatgccctgcgtgcccgcctgcagcccagcctgtaattacaatgccaagcatatcgagatatccaccagttctcacaatcacaagcatcacttttagtttttgcgcttcaccgtctttcgtcccgtcggtgtagttcatcgtgactcacctcgaaagaccccctcgatggaagcttgtgtttgaagttagggtctagccgcttcaaccgcttcaggtaccggtgcctctacctatcaagactccccacgttgttgctccccttgctgggcagggtccaacccctttgcagctctcaactccaacgaaaaattcaccgttgcaactgacgcagcagacagaattgccgaatggcatcatgttcttgctgcagggcttgctagatagcagcattgaagcctgatgcgctgttgggtactgcgacaactggccttgaagatggatctatactatcccagtgcggggaagcacaagtcgaggctggtctctctcgcaacctcactgcggccgagtcggcgacagttcgcgggatcgtgggtcggatgatggtcttctgcggccgctattcgcggcgacctgcagagagacactgcacatgcaatatccagaccgtttctcgctgcattggatttcaccccacaaatcgaacactcttcatgactcccacacattcgaccacggcggctatcagcaaatcaccgacccctcatagaggacctttgccctttttttgtgtggttagacaccagtgggacacctcggggtagggttctggtttggcagacccgtcatcgatcatcatgattggaggctgagcagttacacagcaagcgaataggagaacaccaccaacctcttgaccgggatatggcaaggcactcccgctgctgtcactcggtacctttgttcgcctcgagttaagcccgtgactatcatctaccgagacctgctcccaaggcccaccgagtgcctagggccgggtttcggttttcttcttaagctgggccaagtcggcctgtggcaagtattttttatttttgctccttttggtctttgcattgcgtcaaacttcaacctatactgtatcacccatctcacccctcgtctctcatgggaccttatcgtcaccatgggcttctttacgcgctccaagaaagcgaagaaggacaccccaaagcccccatctaaacatcagtccagtcgagcctctggtcaacgccaattacctccccctcctccatcagcaacaccggcctcaccacacttgcaacatggccggccatacattccatcatctcctcaattccagcccgctggcttgctccctccaccttctggctgggaaccttatcagctaccatacccatcccctcccatcattgtgaatcaacatcactattatcttggtccgccaccgccattaccacctcgcgacgaccattcatcccgatctcaaccaagtggtagtaatcacaagctcaacctcgactcggctgtcgatttggcaaagaacctctgccaagaggctgggatcaccaggatgtttgacagtgctctttcacaatctccattatctagctacggggctgagctggttgaccagagcaatgccctcttgaaccaagtttccaaccagttcaatgatgtcttgaccatgattgatcgagaccattactcgagccacgaaaaggagattctcgcttggcagccacagcaaccacctcaatcgcaggagcttgtacgggtttcagactcctcgctgagcgagaagagcatgcacaaaccacccaaaagaagtcacaaaagggatcaccccaagggacagacaacagcggcagcaacagttgtctcgggaagcattttctccaaggtggaactgtatgcgaactcgaggctgcctatgaacctgcagcctctcaagttgtatgtctcctttttcgctttggccgtcagatccgctattaacaccaccgcagatacattcccacctaccccttactatgcttggcagcacaatactctgaacgtgtctacgacaagcctgagggcgccgagagcgatgcccacgtcgatgcggattggcgagctggtacaaaagccatggtcatcaagtcaatgccgatggattacatgaacacaattgtcttttccattcgtggtacggcaacgtttatggattggacggtcaatcttaagaccgatccagcgtctccatctggctttttggtacgcatctgactcgtccttttgagcagtctcgtaattctaacctttatcaggatgaccctcacaacctttgccactccggcttcctttcggtcgctcgcaagatggtgattcctgtcgcccgccgcctccggcagctgcttgaggaggacccaaaccgtgcttcttactcgctcttgatcacgggtcacagcgcaggaggagctgtcgcttccctcctctacatgcacatgttgtccacttccaaggcggcagagagcgagttgaacatcgtcgccgggttcttcaagcgcattcactgcatcacctttgggacaccgccgatcagccttcgaccgctcaccaagcccgaggactacgagcgtcgccctcagctcagaaagagcttgtttctcagctttgtcaacgaaggtgacccggtggcgagagcagacacggcctatgtcaagagtttattggagcttttcgttgcccctgcgccgcctgccatcatcagctcgcgagatgctgcgaataagaaggtccgcacgaaagagaaggctcccagcaagagctcgaaatcctcttctggtccgatctggaaggtgccgcccaacagactgagcagtgccggccgaattgtggtgttgaggtcgggggatccaaaagccaggtcaaagggaaagaaaaagacggtagaggagcgcctgaacgagggtgtggttgctcaaatcacgtctgatgagcaactacggggtgtaatctggggtgatcctgtcgctcacgtcatgagactgtatgctggcaggatcgagacgcttgctgtcggtgctgtcaccgggcgaggatactgatgatgaaaatattctggatggagttttggatttgatttctctggggatgataccaaggacgggcgttccattggctttttattgcatgagacatgagacatgacaagtacataccagaaaaaggcacaaaacatcccgataacagtttgggaaatgttacgagtatctttttgtactacagacatcactacacactacttgaaatatatcccataccatgttacaacgtattctcgctgtcacacactctgtacaatgatggtcagggatatgtatgccaacaataaaccggagcccctgacagtcattgtgtgggggtggggcggcaccgatgacggcgccgagcgatgcgtggcccgatatggaaactccgataagaatttctacccctccgagccccaccgttaacaccggctccgagcctccgttagactggaatcattttatttgttgcccgtagaggtactcgcgatctggaggagaatcatcaaggaaggagtagcgacagccctcatcttatagacagtcaagatggatctagacccaaagattcgtatgttgatgccaaatggtttcctcaaacgacaacccccaaagctaatcacaggttacagcgcaatactcaaccggcgaccccaactcctttggttggcaaaccggaagaagaagatggcccatcatcatcgtcagtaaccaccccctttctcttccaaaacatcccctctgactcctccccgccagacccaagccatagacgacgcctaccgcgcagtagcccactgccccgaccccgaaaagcaaaccgaaggtaagcgcatcgtcgaagcgctcaccaaacttaaatacgaagtccagcacgaccgcgccctcacccccctccccgacgatggctatcccgatatagccacctacaacgccgagctcgaacagctcaactccccaacctggctgaaatccccctggctctacaccgaatgctacctcttccggcgcattgccacctccttcgccctgtccagccactggaaaaactacgatgtattcgcccgccaaaaaacctccaccttccgctcctcccgccccgccgtcctcgagctcgccgccagatacaaggacttgatgtcccagctccaaaaccaccccgaccagccccgcgaggcgcaggagttgctcttcgccgaaatggccgagatctgcctctggggcaacgccactgacctatctctgctcacgtccctcacgtacgaagacatccaagccctccaagggagcgaagcccgcaagaaggcagaggccaacatcctggtcaacgacctcccgtcttgcttcgcccaccttctcgaagcgaaacaatccggcaaaaaagaacgtcgggtcgacatcgtcctcgacaatgctggctttgagctgtttgttgatctcgtcttggctgggtacctcctctctgctggattggccacacatgtcgtcttgcatccaaagtcaatcccctggtttgtctccgatgttttgccgtccgactttgccgctttgttaaacgcgctggcggcgccgaggtggttttacgagacgccctctggggaggaggagctacaggggaagacgccagagaagttatctgacaaggaggtggaggagttggggttcttgttccaggagtggagcaggttccatgctgaggggcagttggtcttgaggccaaacagagtgtggaccggaccgggtagcttctggagactgcccaaggaggcgccagagttggtggaggacttgaaggggagcgaggtggtgatttttaagggggatttgaactataggaagctggttggagatgtgagtttctcttcatgtttactgttttcttcttttgcgaccgatgctaacagagactgtgtaggctgcctgggatcctactacccctttcacagaagccatcggtcctcttggtcctggctctgggctcaacatcctcgctctgagaacgtgcaaggccgatgtcgttgttggtcttcctcccggaaaagacgaggagctcaaggcgctcgaggatggcggtggtgactctggagcgcgcaagtgggcttggaacggaaagtgggctgttgtctccttctccaaggggtcatgagcggaggatttgtcacggatctgtctgttgatacaggaagcaaggcaccggtagcatactagaaagtcaaattttggcaatagatgaactagctggttaaccagatcggtgtccatactgcgctatgtatttggggtgggtggtatgctaattaagtagccgctatacttgacaattttatagtattcagacgctgggactggagcaacaataatgatgtcggctcatgcccgtcggtgttccgtccaatcatgctgtgctaccgactcatgttagcggcggtgacacccgactacactcgttcccagcaactcttacctagttcttccgtccaaattgtattttccctgaataacccgacatatttgcaaatgcaacctggcgctgatgctgatgggtaccatacccgcacttcccaatgttaccagaactctttagcagcaaaaagaaaataaataaataaatgccccatgtaaccccgtacatattagtgttttcgtcatggaaggagtccgtacccaagctccgcaccgggcctctatcccgtttccagttggtcttcgactgtacgtgacttcggagacttggccctactcgatgctcctgtctgcttctcgccctccttgtcaacagcatcgtcctcttgttcctcacaagagtcaaactccatctcggggtcggaaactgtcgcctgagagtccacatatgttttctcttctgactccggttccatgtctgcatcctcttctggttcgtaccctacaaggcttctaccgttgatgcccctctgcgccctgatgacgctggcccggagctcggcgtctgtcgtttcctctggttgtttgtgtagcctcggcgtcaacgtccatctcgtcctcgctggagctgccgtctttgtcctcccaaccgtcctcgctgtcatacaagtccagatcaaactcagtatcggtcatcaaatcctcggggtactcctccggcagagtctggctcgaaccgacatcaacgtctttaagcccctcgccagagccattcttcctccaacacccagccccttgatcataaaccggaattgctacctatttgttagcctctcccatcgatcagcaaacacccccacccaagtcaaacttactccgcccaaaccaagtacacttcgaacaaggcagatgcgcacaagtcctccaatacattgacaccgaccttctactgcccctcttttcttccttgcccctttcctccgtccccctcggacccaaactcggacccaaactcgcacccctcctcctaactgactcaaacctctgcctcagcacaacctgcctacaaaaagtatcccaattcgggcccttcttacaagaacaacacttccagtacctccccaacctctcataatccctacattcctccttcggacacttccagtccacattctgtatcttcccgcgtttcttgtacaccttttccccctcctttgacttgcggcagaatttgcccagaggttttttggtggtcgggtcgcggggggcgagaggacagaaaactttcagctttccgtggtggccgcattttttgtggcggtagtagactttgtggcacatcttggggggtttctgggcggatacctaggctccgtgaggtgtgggagagtatttgcatctgttgttatgattgtgtcggtgtgggggtggtcgtgaaaaagccgttcttcgtggggggttggaagggttggcagatgggaaaaagaagaaaaaagatgtgtttgaataaagaacgagggaagataagacactgtctttggcttgtgtatcctgcttagaagaaactgggtaagattgctgcttcggcccaagacaaaaatagcactgtatatgttgaaatatctactattcttggtgcaagagaagatagagatacctttgagaaatgtgattgcaaagaagaaattgagttcgcagttggaaagacaatctctgctttggcacgcaagtgaaacccaattcattgcaggaaccatccttctgctgccccaacaatgagggaaagagcggccccggatgaggcacccagtatccaccctcatgggcgctagggaacgaaaagtcggggttgtcccacgccatttccattctactatggggtgaatggatgtttgggtcattgacgccatggtcataatacgtagccgcggtcgaagccaccaactggtggggataggacgttttgccttgctcacgtggatggatacgagcgttggttgtttactagcatggatactggtcacgaatttagccctttttcccttttctcaacggtggaggctgttgccacttacatttacaattgtctaggcaagagagagagatcatggaacatgtcatgagggaggaagaacagtttgatgtcgacgacaaaacatgtccaagagatacgataataagatgaaagagaaaaggaaaggaaagaaaagaaaagaatcatctgaaaaacaaagggccctggcctgacactgaaaaagggaggcaaccaactggccagcatctccctggcccaggtcaagctttgtttgatcttcccgtcctgctcttccccttcactctccaaccagctaagccatcaatgacatcaacatcatgaatccaacccccgtctctcacagacggaatctcgccaagcagtggcatacctagaccatggtctgattttcaaaaagcctccttcctatcctgataagatccgcttaagctttcatgtccgccgccgcaacaccaggtgggagtcaagggagtagcgtggttgatagttcctccacctcaacaccccaccacgggtcgcgtccacatgtctgtgtgaagtgatggcacaaagctgagccatgttgtgccacgggacttttggcaacccctcttctccatacggaattcaactggcgcacgccatctgccgccttccccggcacatcaaaaaatccatggtaaatatcccacctggaagcccactgtctcacagggattgtgatatccagtcgggtttttgccttcggaggaggaggtggctgggttgggattcgctacacttacggagtactactttgtcgttatcaatcagtcacccacaacatatgttgtatgcagtgtcgatctcgatagggccaggggtgcccagcagccgatccccctttagtgctgatcatggatcttgacgcgggctctagtcccaaaccggcaaagtgtgaaccccacagaagcactgcttctgcattttcgaagcactggcactggcaaccggaggtggctgtgttgacttgaagctttatgcctcccctcatcgtcagcaccaaccccagcctgcgaaggagcaatcgatgacgttcatcaacatgatacttttttcccgcaaagaggctcgagacattgacgcctcacagcctcaggagcgcatggtttggaccatgtccctgtccctgtccaaatggtcgcgacgagacatcttctccgccttttgcccgtccatcgtactttggtaaatagtggcggtgcacagcaggctctgcttcaaacaggtctgcacctgagccttttttgctgccgtccctgtgtcgcgtgtcgcatgtcggatatcttgcaggtctcagtcgggggtttgggttggtaggcatatcgagatttttggcatgcggaggcggagctgtcttggagcatgtgtcaaccctagttctcctgagccttgtgcgtgtgagcaaaacaagacgatagaaaccaaataatcggatgctcggcgaagtcctcttcagctgtgggtagcttcgtgcgagtatcgggcctgggattgtcgttcaaaaatacccgaggcggcgcaaggtcccgaccgttcggagctgtgtgccggagctgcggagctataccagctgcttcttggagctatcgggtccgcgccgagaccaactgcaactcaacccggcgccctgattggagcaacccttgtctcaagagatctccctctgccgatgacaagcttttgttcgcaaatctgtaaatcgacgttcctgacaatacttcaccccgtggaccagcgcttgtctgtctcagctttgtgtcacgcttgtctcgagcccgcttccagcactggccacgttttctgtacaactccgtctaccacaatcctccatgaagccgggactcgtctttgcgcacgggtggcataggcgccacgtgcgttcaccggctgtaagaagcgtgctgctcgtggtagttgatgacttggggttgaacaatgccgtagatggctgccaataattgggacccagactgctgacgcgacagattgggcccctcatggcggccatacttcctcgttctgtttggggcatgtacaccgtcttgacctgttggtcactttctgggaatactgttccacttgtcaactccaatggcgcgagaggtactcagcctcacggggtagggcatcaagacggcaaactcatgagcagtcaacgtcatcctcacctatcgatgcctccatcgagagtcctatataagacgcaggtcgtcctccctgtcgaggccgatgtgatctgcatcagcatcaccagcttcccaagtcgcctttgtatcctcactcgcctccatccgcatcgatccttcaaacaaacatcatcaacacatccaccacgagatcaacggcggcccacctaaaattcccacttggggctagaaccagttcgactccgctcattaccaaccaactcagggctagactgaactgttgccttctgaacctctcttctctttgaaggctttggtaagatactctgtcaatagagatctagcggccgagctttctccaagtcggtggcggacaacaagaaaccatattgactgagaccttgtctacagcttaggctcttttacttcgagttcaacaaaaccccctgtgacaacgtggatattgactggctgggccaccggcttcactcaagccttgagacaattgtgcaaccatcaaccacttgggtgccaatttagcaacgaagatcacaacttcagcgaaaacgccatatcaaaaccgcctccgtatccgctgcacagcaaacacagtatcagttcgaatctccacacaatctcgccaacagtctccgacttgtctctcaatcccacaaagccaacttggctgactgaaagctccctctggcgaacgctgctttccgagacaattgcctgatattccctttcccagcaacaagtctcaacattctgaaacgggtttgaaaacgcacacccgagatctctgtccagttaaaccactctcggctccattgacttcaaaggaagttcggatacgagataccaagtcagctcaggacaggcgcagtaaaaacaggcgcaatccgtgtttcggcatcaccaaacgtgaaaaaccagcaaaccacaaacaagatgtgtacttacttctatctccatcaccaccacatgccaccctgcacccgcaacatcgacatggtggtacactacagcttctgccccaactccaccatcgacagtgcaggtgctcagcagccgtgcgacagcccgcattttgacaacacccagagcgtcgactacaacgatccctgcgcctccggtggatgtctcgtttcggccgactgcacctcgggcggctgccgtctcgagcaactcaacggccgttgggtatgctgccagtgcaacggccgcggcaatgagtatcgctggtgtcgccaccgcatgcgcagcagcccagataccttttgctaccacgtttgctgtagtgggtgcaaggccgataacaagtcatcatcgtcgtcgagttccagctccaaacgcaagggtgccaagtaggtcggtgataaaactgaaggacaggggcaaattagaacgttgtcatgacgatatgaaaagatgaaaagatttgggtagccgaaggattttggaagactggaaggagagcagaggggaagctcaggtcaaccttcacaactccggatgaacctctgcgataaacccaaagagacctcacccggcccgacttgacggtgtcaccgccgacacctgtttcttctttccgtcccctacccgttcttgtttctgaagaccgcttgggagcgacaaatggcggccgatggaaatgttggggcacgcgtgacgcgtggagggccccgaacgaggggccaatgtgaatgaccgatcatgagatttgggcgctaggttttgacatgattatttttcttttctcttgatggatctcgtatgagctggccggccagtgtggactaacggcaacttggcatctgtaaccatctcggtgttgtcgcgtgttgataggcgaaggtgccctaaacccacccacccttgagacttcaaccggccagtgctgtagggaacttctcaacaccccttcggcaagatttgtgtatctttatctttcttcgtgtaacaatagcgggccggatttccccttgaggaaggcccaagttagtgactgcgatcaagcgatgaggcttttggtgtttcacagatcctgctggtattctcgctcgcgttggttgcccgaaccgacaggtgaagctgcttgattcgatggagaagagatagattgaaaccaggaaaattgcttggtcagatctgttgacccaactggtcagttcaatcctctagttccatgcggtatccaaacgagcttccggtttctgcagccatgctgctggcatcgagggtgggtggcccgtttggaaggccacccccaccctaatgaccacaggtattgacatcttgcttaaatattgaatgataatagtgactgattagtatgccaaaagggccggccgtcctgggtgacttctttgccatggagtcctacacccggtccagaggcatcaacacaacgcatagacaaacgggaggctaccagagaagtcgttcggaatgaaaaccagattcagtaactttggaagaaacgatacaatgactagtttcgtttcgaagaacgctataaagaagatggagagcgtccaccgcttggtggttgaaataacgaggagtatggcgtgagcgtcctctgataagcaagcagcagccctggtaagagaagttgacacccctgaagcactctttcggtgcctgggatgcattctgtggcctcgaatatggcactaacgatccaggtctcaagccgaattcaaaaaggagcgatccacaagccccctcccctccccagcagacacgactccagactcgacgacgtagggatccgcggctgcgaaatgtgtcatcaggtagcctatgccttgccgtgtgagcacgtcaagacgcagatagtctactgtgccaatgcaatcctcgaaaatagtgccgatgagggtgaagtccagggcagctctgcggcccgatcttcctcgtcatccgcaaagccgaaacacaagacaaagccagtttctgagccctcgaggtccgataggaagaaccaaggctcggggtcgccgaaagccatgtcgtacaagcaaccctgcgccaacttgacaatccagtccttgccatacccgatgccgccgtctttcgcagaaaaccccgacttcttcacgtcatccctgccatcccccaactgcccactgtctgattgcccattcggaatgaaaggtcggtgttggacctgttgttggtgcgggaaaggcgagaatagaactggacgttgtgggtgcgtgatgcttgtcgaggggaatatgttgcgatgtgaacacttgtgttgtaacgagtgtgaaccgactagcataagagacagtgtgtaggactgagcagggaatctgcatcaggaaaccggcgaggctttcctcatgtctatggattcgttggatcgggataaaatggtacgatgtgtgcatggtaacgacagcagattccctccttgcttcccagccggcttctcatgaaatagcaggtgacccatgtctctcgcgtcatgtattccagttcagcccgttttttccgaggagacgggtatcgagagggcgtcttccgacctggccagggaagggtctaggggatatttgaaacaaacccaactgtttgtaacgttgctttcctgccagatcctttcagccgttgaaaagcctatgtgttgaacatgtcaacgactcaaccttgacttgacgcaatcgtggttcaagcgtgacagacatccggattccgatcgaacaccttgcagctgatggcttcgtgaaaacttgcaaccggaagatattgccctctctggcacagatcagatcaacgtggcgcgcggcctcggatcaggcatgatgcacatggacgatagtctcgtctcatcacttgcccgccataagcacttctcgaagatctagggactttggtaagcgtctacgctgcatgcgcggaatcatgaaatctctccgctgcaagacatggctggttgggagatgcctcccacgacgcttcccacccacaatgtaactgtgatgacgctgcagataatgccaggctgccaatgacacaatctaacaggctgaccgatgagttaaatttcgataaagatcggaaacaggacgtgtgatgttcacgcctagctgcaaccatgcgctatgcgtgtaatgtgcagcttgcactatccagggcatccagaaattggccggggggggagggcagtaacaggcagagtgtgatcgataacccagctggacccctatgaattctcgatgaccaaggttgtgcgaaaaatgaagaactgcgttgaaatctcgaagagatcgaacctttgaccccatattcggaatgcaatggcaaagtgcctggcaacgtacaatcgattaccgggagcctggtcgttgggtcagatcgggcagccgggggcaggggtttcagcaaacactgtgcaacggtagacgttggttgttgttctgattggttggtagccctgtacgaagaaagcaaggcgaagcgccgcaacctcacatctccgaagacaggcccgagacgaaatagaacgctacaggctggacagatcacggatgattgtcaggctccctgtgggtgaattcgtatcgggaatgggagttctgaaggtaattcgaggagacagctggccaccacacagtcttcttttcttttttccagaacaaggagggtgtcatgctcacgatcgcgacaccctcatgaggcgtcaggactttcaaagccagatcgtggtggcggtctcgcagtgcagaatcatttgtatgactggaagtcacaaggaaggcggccaatagatgggccttgtcgagtatcctgaagaactaaacagtttcgagatggtgtccatgacaatctggggggtgccgaaggtcttcgggaaagggaaaggtataagatgacggataccgacatctcttcctcatgagtgtaggcgtacacaaaccgagatttgtatcctgagtgaccacctgtcagcctagacacaacatctcgtgggcacgggacagagcggctcagtcgaagacacacctttcacactcaactccctctcaagccctctcttgatttggaatctcaaagcacctctcgtgctcccacgcccaatatccaccatgtgccacggacatccgcatatccacggctgtggccaccaatccatgacttggcattactgcccgtcagccctgatcgaccttgagacggggtacgagacagcgtgctccaatgtcacctttgctgctccccagccatccaatgccgcctgtgtgctgatcaattgcgattaccgcagtgggggcacagggtggacgtgctgcaactgcggagggcgtaacacgagcgggtggtgcaagaacatgtcgcccaatcccaaatgggagaagaacacgatcaccaacgaatgggaatggatcgagacctgtgaccacgggtgttgtcggaattgtgccaaagactgtacgtcctgaccccctcctgataacccccccggattccactgttccatggccaagccccaggtgtggttcctgacacgcacccagcctcgagcaactacggcgagcccagccgcaaagacgggaagagaagtaaagattctcgaaaacaccgccaccgaacacaaggagaagccgggtcttcttcggcagctgatcccatggcctcgtacaacatcacgctggactacagcagcaaagagtcgaggggattgtcccggaaagagggaaagtcgtcctcggggcacaagaagaaataggcgaagatccatggcgaaaagcggaaggcaaaaggcgaaaggcgagtgttgaattcctgtaccatgtgtttataagaacatgtatatttgtaccatagcaacttgggctcccaacgggcccaagcacggcggtgttttttagagcattttcatggcacatagctaggcatgggaaacaggatagggacaggaagcagaaaaagatcaagggcttacatgatggagcatggagtttggcggtgacctgcacagaaacgaggcgggattagtgtgttcgttcttggcttgctgttttggagttttgaattaatcgggggccggttcctttgtgcgttggggcggccggcaaagcctgacggaggtcgaatcatcgataaaaggctgaggtggagatataatgaacgaagagatgacttgattcttggtgactcatgtgtttgttccaatggctcgtgattactgttggtgactctgaaaacagttggctggctcatgccagtaaaagatggccggtcaggtgtaggtaagatttgaagaaggagcggtctgccatctgttgatatatgggcaggagcgagtggtgggtaataaaagaccgagggaaggacctctggagggtctgggtcccgtctggatgagcttaggtgggcgggcagctgagaaggcattccaagatgggtggtatataatgcgtactatacagccgacggttttcggcatgttgtgcttcgtgtgcaactggaaatagaacggtgaacacccacaatctagctaccaagatcgaaccaaccctgtctcgggtcaggcatccctgcatgggcatggggcgacttgtggcacattgctctgaggttgtgaatcgacgtcgccgaagagatcggtgttgagtaccgtcatttcactgtgatgccatgggaaataagccgactttatggacgagcttgtggcgggtgtggttaacgactggccacggaagggtctagatttgctcggccagctgcatacctacctgagccaaccagctttaacgggattgggtccgatgttcatgatagggaatgaagctgtctcaaaacatggcgccaccgacaacatcgtatgtctacatttttgatcagatcgcaacctagcagtgatgagagctgggcattcagatcaggaccgtcaggtgccctaggcaagctcactttgttccaagacacctacctgcccgtcacctatcacatcttgatctgtacctatctgtacaaccggaaccattccgttacaccacattgccgtcggtgattgaagaagattctttgcatttgctttgttcgactgcgtcaggtccatggaaccgatgttgagtatggctggcggaggtggtcatgtgacgaaccatgtcctttctgtattgtctgcatatatctactccttataacaccagtgtcgggtgccatagtatagcagcctaatgtctctcgtcagtaccatcagtctcgatgtggtgtgcttgtcttgggacatgtggaacagggtgacatgacagacacctagtgactgagctgccttgtcctccctcttgtgccatggaaaagtgatggctagttttgacccctggtgagctattttgtggtgtgaggttgccgtcggtctcggcggaaggttgactctttgtctgtgtgacggcgtaccaacgggtagcacccaatgccacgtgccaaccatcggttgattgcagccgatgacggcaaggcaatcggagagccgttatctctctgccctttgttcggacgcggacgcatgcgattcaaactgtcagattggcatctggtgctttgacccgagcccaacgacggttgtgtaaaccatggtgccacgcggcgaaagccgccaggtccttcggagcaacttgtctgatattaaaacgtccggcactggccccgtgtggagtcttgaccctgagcaatacctacttactgtgtaccaccataaggtattgtgcagtgcactgttgcggcacaattgcaggcctgtacagatgatacggagtatttaaatatcaggtttatatcgatactgatatcttggacctattcgtaccattgagcaattgtttggtcaagctgagtacggacttgtggggacgggcatttgtgattggtgtcgcatgggtgccccatcacccaaaaggcctggacctctgctctgaacagaggcgctgatcatgctttgcacgtgtggtgtctttgacggcagccagaacgggccacctggacccgacaggcaggttcctttgtccgttcttcaccgtcttgatcatctcaaagagcttcagcacgtggttctgaggatgccgtggttgagatgattctttcatggcatgggaagaaggagtgggtggaagtgaggatcggcccctggcccacagcccaccccgacaaggcaagggtgatggttggagggcgcggagcgaagctgcaagtgcgcgggccacccacctacgagccacatggttacccggcactgtagaagttcagaggtgcctcccgtttcaccatttccttcaagttcccctttcctgattctctgcccggcctggcccgtttctgcttttagtgcctctctgtctctgcctcacttaaccaaaccactttccacctccatcatcccaagtgacaaaaccaccaaccaaacaccagactttgcaccatcgactccctccacgtccttagtgcccgccttggtcactgttgcaacacgccgccactgaaataccgatcggcatttcccaccaccgctctttgtcctttttcgtctttgtcggcgtttcaccttgcgacaagggctccagcaaaaaaacaattgccccggggttctattttcgccttatcgccagcatgtccctcgactcggccagtcgtcccatcatggctccatcggtacgtctgtaaacctgtttatgcccgtcggtccgttgacgttgcatcctcatcgccttctctcccaaaccttcccgcaattcactaacactattctttccccccttattacaggagaagcgctacagcacctacagcatgacaccctccgacgcccccaccaccctcagcaccgacagcatgactgccgagatcaggcccatcgtcgacggccttgagcgcctcaagaaccctcgcctcgccgaccagcgcgtgtacctcaatgaagaaaagactaccaacctccagaagcttgccctgagcgccaagctcgagcgcgcgcttgaccggaggatgagcagccaagatgccgtcatgcggccgcggaaaccatcagttgtcgtcaccgagaaggagaaggcttgaatgaagacatgcgcgacgacgacagtcatttgttgagatggagaatgggaagaaggccaagacgatggaggcacgcatcagcgggtgcgatgtggagcagctattgcaatgcccggtccacgccgtgtttcctcgccaaattcgatgcaggaaccgcctcgaaaactacaccatcctggcagtagtcgagccatcaactggagtcaacatcagaagagaggagcagtcatttcatcatcagcgcgcgttcgggggccagcttgggaaacttttcattgttaatttattttcgttcgtgttttcagttttgcggcattggcattgtcgatgtactgtcaggaaaggggtgctgcttcaggatcgatgggatggtatgggcagcaatagatattgagacgagacgggaggtgatgtggaatcttgaaggattgttgcaggattgtgggcgtggtatcatactagccgttcatcggcttttgtctgggaaagtgagaggttatatcagtgggaaatggaccaggacttatcggcgggcgtaattgcaaatcctcacaattatatatctcttgtcaaaaaaaaagaaaagaaaagcgatgcctggtattatgtccgtctcattcactgcgctctctgcttgccctgagttcttgtcgcctgaacgccttggtgaactcccgtgaaacgatgtaacgacagccaagaaaataaaacagaccgacagccagcaccactatgctgctgtctctatcgcatcccagataagcttccaatgccctatcctcttgccatggcatcaccaattccctcataccacttctcccgtcaaaccctctagttcccctccttcgcaatcctcccctcaatctccttcaacaactcagccaactccttctcctccccctcaaactccaacgccttggctaccgcccccctggcctcttgcaacctccccatttcaagcaggcacttccccctcctaaaccaagccttcgcattaccctggctcttggcagccacgctcgcctctgcatccaccgccgcctctggccagttccccagttgcatatgcgcctgcgccctgttgctatacagcgcgtggacctcctcccgcaccagctgcgacggctcccacggggcccgtgtaagcgccatttggagaccgagggtgtagaacttgattgcttcggcgtggcgccccttgcggtattcgttgttgcccgactcgcgaagcttggagacgttggctgagcgctttgggttgacgggcatggggggaggggggacgatgtgggggggctcgatttgggtgaggatggttctgtggagattgttgagggcggcgagctcggcctcaagggctcgcgaggaggggccgagggaggagatggatttggatttggggtcgatggttagggggaggaggtggaaatggtcttggtcagacattttggctgctttggtggggtttttttcgaggtttaggagagttattagcggcagtttgtttaacgatgacgaggatggaggtttggtgggcaagcagaagaggaaaaaataagctgcgaaagttgaggtcgtggttctagttgtgggttgaggtggtggattggcttggactggtgagagctgtcgagaggacacttgtgccagttggggtgacttggccttcaaagtgaaccgtggcgttggcaggcggcgcgtggacggacagctttccccagaaattccttatctcttatcggggagccaacgtcgaatcctgatttacctagggtagttgataagccaagttaagttaagctggccctcagcttgatttgacttgccgcctagagcttaaatttaatttgagattattactagcttaatttagcttatgaatataagctttcagttatattattaaatattcaaggattattaatggattttgttagaataggtgtttgtgacgaacccctgtacagaacctctgaaagggatactagttgaaggtaacttctgacaattggttcggtgcagctaaacagtgcacaacaagatgtctcgatgtaaacacaagatgccgtgaatacaactgtgaattgcatactgcggaactgtctatctacaccagccagttcctccgtatatatagacctgtttatcactattatcaccagtgataatgtcgattatcactcgtcgttcaccgaaggctggtggtaatcgtgattatcacccttggcgctagtgataatctgacttccccacttttccgttcctagtggttggacgggtcgcgccccgcgctccccacttatgtcaggtccgtgacaaataccactatagtactccgtagtggagttcgcgcttgacctttaccatatatttcctaggggctttacaggacctagaagtcgaagatttggctgcgttttgcaaaaaacgtgctcacgcttatacaaaacagagagaaatcggccaccggcctaccgtaggtgcgggtagctgtgggcctacagggccgctatttccacaaggcatttatagggcctttagtagcctaaatccagaatttaggccattttaggccaccgtagcgtccgatgcagggcttcgaagttgactttgtactacgtgaatctttgagggtggcgggtaggaatgttgaggccgatcttcgccgtatctaccagttccttcggaactaaacgccttgcagtattacagcagtaacctactgtaaaatagggcttacagggccccgtttttaacatatacactaggcatagcttttaaaatataaattaacacacattaggtaaaagctctgggtctcctcttgcagacccaaaaccggagaacgtgtgacgaacccctgtacagaacctctgaaagggatactggttgaaggtaacttctgacaattggttcggtgcagctaaacagtgcacaacaagatgtctcaatgtaaacactagctaccgtgaatacaagcttgaattgtatactgcggaactgtctatctacaccagccagttcctccgtatatatagaccttggggccgtgaggtgctcgccctgctatgggcccgatcactcctagcacattgcatcctgcattgtgctcgtcgtgctatacctctgatcactcctagcacattgcatctgcattgtgctcgtcgtgctatgcctctgatcatccctagcatcttgcatcctgcagactgctcgtgagccttggcgccatagcacttttgcctagccctgatcggcttgttccctgacttcctgaatgattggctaggggcgacctgcgccccacatgtggcgcgacgtgccgttgggttaactgtgacagaacgccaaaacccaaacatcattttgacccttttgttctccccgcccatgccgttgcatggtttttgtctcgcacgcagattctcatcatgtcatgccaacaatcaaaaacacaaatgttactcactccaaagtcctcccagatatttccctcggccaggcatagccaaatcaaatcactcgtaaatcagtagtcatccctctgtaagaaacccattcgatatcattgctcgttgcccacactcggattcacagtcgaaaagacaacggggggcttccatgagttcgtcatggacggctctgagacaaacatcagagatatccagtacagttcatgttcccagcagccctcttgtggcgtgctcgggattgaagtcgctggcaactgtcagttggctggcgttggtgtgtttaccgggcaaatgggctgacttacttttgtctttgagacagtcgatcgtccccttcaaaaatgcaagctggcgagtatcgagatatttgatggccgattttgagacgctctcggcatcccactcgaaattcatcagatcacaacgcttgaagtaggtccagtacgccaacatcacaccggcaccatgctggacgtcttcgacgaacgttgtaagcgggtggtctcttgggccgtaacgtgtctcctagagaaaaagtcagcaagaaatgcgcgttgaagcagaatagcaaaggttaggctgtaccagaggccgccctttcgagttttcctttgcatgacggtaccgatctttgcaaatgcaggccacattgtggagaaacaagaacacaaccagaaaggccgtaaaccatgcatccttcgaatccttccagagttcgggacccgagctgagaatcttttcgaacatactcagaaattgtggcacctggctcttgaataccgtgtgataccgaatgctgtcaaactgtgccacgatcattcggggaatgtacctcgtcttcagctccctcgattccatccccagtgactcttgaccgcaaatccatgccgagccggtttggtgtcctggccaacagtctgttagtggtattcatcaaattggcgctggaacatcatcaggaattacatacgaatcgcaaaccaaaggcgaacagcttttagtagaaactcagccagatctacgcttttcttgtcccgattttcttctcggttttgtttgtgccgctgcaagacaagaggtgggtaatcagctttcagtccaaattcaagtcaactgaaacgtgggggttctcgtaccgatgactgccgaagatgctccgcgatcatggaatacatatctttgacgagatcatcagagtccttggccgaatcttccagtcccttgatagcattggccgcgatgtagtgttgaaaggctcgcccgtgttccttcacattcacgagaccgtacgccggaattctgatgccatccctgccaacaaaattccggacgagctgatcaccctcgactgccctgaacgcccgcactttaagtgtcattggcgtttcgcagagcccttgagccatttcaatgaccttgatgtgattgtctgcccaatcgttcgccctgatgttgatcaactgggtatgatcaaatcgcttcgtgtagcccagccccccatctcgctgcaacaccaccgaagccagcttgtaacgaagacacgggaggttatggatagtctttttggattccctgcgcaccttgagacaggtgacgcaaggtgccaaagggtcattcgggttatccacattgggaagacactaaacacaccagagattagattgtcatgctgttgttcgtcattgcattttgtttacttaccctcactctctggttatgacatcgtatgcaggcccgcatggtcctggtatcggaggtctgtttcctcaaattctctctctgccgtttccgtcgctgttcttccggttcttccagttcgggttcttctttgatcgccagcccttgattgacagcggccgctgcgccttgctgagtgacgtccaacatcagtgcttgctccacggcgacccagccgccaacaagagccgtttccataggtacaatgatctgttcatcaacatcctgcacctctgatttctgaagctcatcccaggtgtggccatttccctcttttgtgacatgcacatatgcactgcaaatcgatgaggcttcggtgtctagcaagttgccagggctagctctcaaggaaccactgtcgaccctcggaagacaatatggaaaacgatgctcttgggtgatatcgacactgctaccaaataccccatcaggatatgctgcctgggcgtgaaattgcgataagtacgcatgttgcccctgggcatttgttgggtccctcgaggtcgaatgggccccatttagggaaggcggcggcaggctatgcgtgggtgtagagccggactgaaaggtgcgatggaaggcctccgggaaacaatcttccttctgcggtagtggcaatgcgacactttcccagcaatagcgagactgaccaagcccgccattaccggtatcgactggcggctgatgtagcggctgaggtgctgggcggccaggccgcgattcccaatcttcggttggattcacgtattgcgtagaagaaacaggctgggtggtggcaagtcccatgggcagctctaaaggaacctcaccgacgtatggggggacatctccgtcacccattgtggaattgtccactatcagactaaagaaggctccgtgttggtctatggaacacgtcaatcatcactgtccaaccggaccttggattgcaacgccatctcgttcgtaccttgcttgtagtcgtacggagaccatgtaggaactgctgcgccgtccaaccagttcccatacccatgcaggtttggggcaaacgtggggtggtggtacagggagccaccatagagatcactatcttgtgacgggatcaggctgaatggattgaccggtaaagtcggtgtgatctcgtcaagtatggcacctagctgacggcgtttctttggctggcgggtatctgcatctatcggactgcggcagcgcggcggcttcgacaacccaccctaaggttcagtaagcatccagaactattctcgacaagttgcaagtaggacggcacagaaagatcaagaataaagtgaaaggaaaagggagtatttacggtcggacgcaaaagtggactctccatcctgctcccctcacctacgtgccctcgctcgctgttttttgcttccccagtttgattcgggatacaaagaacggttctatcagaatattggttcgccaagtcaacctgatctcacacaatggcccaggaaagatcaggagcaagatcttgccaaggctatgggtgccgtggtccggagcctttgatcccagaatttgctgccaccacgagaagccggttgcaaatgtggtgtcagacagatcgggcaacacgggcaacagtctagtagacgcaagaacaaccaactgagaccgggccggatggtggagggactgcgctcggaaaggattggtcggcacgagaaatgccactgcaagcgagaccggcgagatgtcaagagggcgagacttggccggattcaattcgaacgctgtgcaacaccggcccgctttcacaacctgttaagcaagacagcagcacaagcctggcttctcgtcgagtgcaacaaaacccctggatgggttgcagatgcgccgtcagcatgcatccacacccgtgggaactttgaactcgaagactgcggctggtgggttggcggactgcctggtgagggggtgcccaaagggtcgtgtcgtgagacgcaaaatcgcaccaaggaaataccgactttcaccagaattctggtgtgacctgccccgtgtctaacccagttggtcaaacaggactgggttacgtgctgtccgcggggaggggagggggggcgagacagggtacgacgatgtcgagaggtgggatatccttgtgtttcgaaacaccaagtggaggccggggagaaaagaccctggggtgacagtcccctgcgaggcaggtgctgtgctccagaccacaaaagtgtgatgataccttagaccgtcctgcgaacaggaaaggctcagagatggagatgaaggctttggggcaatcttggatgaaacgggggaaaatggcgaacaggtgatagtgatgagggcagagggaagaggtgttgcggtcacgatccacggcccaaaatcgatgtcgtctcccacctctgtccaatcatcggcagtgagatgtcttgcagcagccaacagctcgcctactgtggaaaagaggggttagcaagtcttgagacagagaattccaggcctgggctcccacggctcctcctcttgttgagagaggccacagcagcaacgacaggggggtctccattgggaacacagtgcatgtatcatgcaggcagccattgacaggccagccacatcttggttttgttgcactggactggatgcagttggagattttctcccatcatcatcacccatcactccttggctcctcccttttctccccacaatctacgcctttgttcgaatcgagtcgctcgtcccgtcccagcgatacggaaaatgggatgtatctcgcagcagcatctgcgatcccgctcattctcccagaaacccagtaccgacctccgcttcgtgtgacgtgaactctgccgatgaagcaagggagaaacagtcgcgttctcattggtgcgtcataaatcacatttctggccacagtggtcagccaatcaacttttctcgatcatttcacactcagacctgatcatcgtcacttgctcatcaagagcctcatattgacgggtgctacagaaaaccctttctatgaatccctgagtcccgtttccggaatactaccaaacgctcggacacgactatgacagcggaaccatcccggggcccggacggtccgttcctagcctgttgtactttagtcgagaaatgtttccatctatcactagtgaacttggtttagtctgctctatccgcccggaaattggaggggaccccccaatctcgtctaattgggccgccaggttcttctctcccgtgagcgggcctaagctcccctgcgtacgccctatgagactccaaacagaatttgtcgacagatgtatgtgtccccaggccttcgatgccttttccttgaggatgggaggttaacgcccgatgagcgatataatgctaatgctgctaacataatgacttgatccgaggacagcacggccttgatgagtatcatacaacatggacaattccgggtaggcggctctttaccgtacgaccaacctcaccaggaccccttttgctttcgttctatatctccgaaccggtttgcagttttgtccttggcggagcccaagtacatgccaccttttaggaaaataccgcgcttctggcgggcctatgtcttcccttgaacgccctccatggttggccatgataggcattggacatgacgagctgatcatgctgatgcaaggtccgacagctcaacagcacacacaacttcggcacaccactcaacatcgctgccgccaacctgcctgagcgaaacacctgtccaatcgtcccccactaccgaccccatgagccgttgtccgaatatgggctggatgtgggtgaccagcccatgtcgtggaagagcgatcgtccacccggcgaggttgggctcgactaggtataataatggctcctctccgtcctcggtggaacccaatgtcagccctgggcttagaacagatttattctctctcactctactggaaaagccaggaatacagcacatattctctcaaactaccaatggatcaagttagcagcttgtttgggcaatctcgtgcaggcctgggatggttggagcaccacgccatggcttgggtgcctgaagccatttcctcggacagttatgttgttgaccttggtcctcggggtgttcaagaggtgcaagagggactgcaaaggttcaaaggtcagtgatgtgcccccgttctgtgttgggtgatgctttcatttgctgacgaataagcagagcttgagcttgatggtcacgaagtcagtcgtcataatttccaccttccaaccctcgaggcgcaactggagcaagcctgccacgaggttcatcgaggccgcggatttgtcatcctcaggggcctcgatccccaacagtattcagtcgaggacaacctgatgatctacctcgggattgctgcgtatattggggatcagagagggtttcaggacaagaaggggaacatgttgagtatgttttggaatcaaaacaatgtgatgaactgaactgatacctgcctcgcccacatagcccacatcacagcctccaaagactggaagacaccccctgagctccgtcatggtattcataccaccaaaggcctaagttggcactgtgatatcggagtcgacatcctcgcgcttcacgtccgctccctcgccgagcatggtggggacacatttatagcttcatcgctcacaattgtaaaggagcttgaggcgctatacccacacgtcatccaagcccttcaagaagctgcgtggccaatccaaatgtcggttggcacaattttgtcacatttcacatgcgcactgagccatcgctaattatatttcccgcttattagctcaggcaatccgatcccccgctacattctggcgccactcctgcacatggaccctgagaacaaccacatcattctgagcgttgaccctgggagacttggtgtgcacccatctacgacaagaaccgatggcacttcgccaattccgcccctcacaccaactcagctcgagaccctccgcatcctcaaccaagtcgcctcaaagtatcgtcttcgcctagacacaaaggctggcgacatcgtcttgctcaacaactttgcccatttgcatgctcgcgatgcctacagcgatcccggacaaggccaaggacgacatctggtcagattgtacctgcgtaatacagcactggcgcaccccgttccagagtctatgcgtgtcccctgggaggcagcatttgggcccaggaatggggagggccgatatcctgttgctccagctttagaatacaaagcacctcgatacacggctggttctgctgcttttcccctggacgacaacgatgatgtcaacggagacggcaccgcatgattccttcgttgccaggacgctcactgccacaatctccctttgccagcctcaagttggctttgattttgagcaacttcgaagttgagctgctgccagcaacactctcgcaaccttatcttcaatctaacccggactatctgcgttggcctctggttgtttcacaagccaacgcctttgcacccattttagtgcaggcctatcattatgtggaatttttttgggtagtggtggccagaaactttgtctcagaatgtgggtatctatggaggacaacgcagtggccaaatatatgaggttacaatgagccaaaagtctagcctgatggcgattgctagtttcatgagccttaggatgtctcgtcgagtacttttcgaattaaaaatggtcccctgttcatcgcagctttccgtaatgtctcggccatcacaggcagtcaaacatccgtcatcaggtagggatgcgagcatgccaactgcatgcaagcatagcctgatcacatccacacaaaagttcagaatccggaggggaaacgcctcctgtcagaacgggccgaagtctcggaaagcagctggtcaattgtatgtgtccaagacatggatgggtacaagacaccccacgcttcagtgtccgtagcccctattactgggtgattgacacgatggtggatactgtgattggggagccgaacacgggcaggtaccaaaagagtcaccataatctgcaagcacggcggctgtcaaccatgaaattccgccataaaatgtaacagtggatgtcttaactgaagacctggtgtccacgaagaggtgggtaccctagtaccagggcaaagtgacagaccaagcatctcggacatggctccgctgacaacagcatcacattaggctcgagcttcttctttcagatatacttgcatcaatgcgggggcctccatccaggttaggcagatggaactgatgtcagaactttggggcaggagggcagccgccctctttcgcgagtctggcagcactcacccatcttgactttgctactgatcacccccggcccattttcggcctgattggcatgaccatacaactagagaatgtgtcggaggctgtttcaatacctcgatggtcggtttaccgagcataccaatggtatgcctcatcacaatctcctacgggtggtaccggtttatttttcattgcctctcccttgatcatctgtcgaatgctgccgcagtcagttatcaggagaaacagcatttgtaactcctcttgccacgggtcgtagaccagaatcaatcgactgcttcgggtagaaggtattctgccgcatatatccgggcatcacaccatgcttcgaccatatcgagtagtgaacacttcgacaggcgcccacgggctgatctcccaaccggcgtcctctcagctaagcaacagttccgcgaacaatcgctcactggatgtcacgaatatcgaactagtatcacttagtacccgaaccattgaagacattagacctggagaagagtgtgtatacgactgtgttgtccgagtccgattcggtgccgaggtccgtggacacgtatctgttcagctcatcgctgtcttttgcctccccaaggaagcccaagacggatgcgtggacaaagtccggcggcaaacgggtgttaagcaccaacaccatcaactcccattctcactatacttgatcaggattgttcagtagatacgcattcaagtttataccaagaaaatagctcatcgtggatgtgtggtactgtctgggcagtgcacttgatgacgaaccgcttgccctttccaaacccgcatgcaaccagacatcacgtattgcgtgccatcgccgccaagataaagctggataggtacctaatctgtcaccggttccatggtagctgggtgccaaaggctgatcccaagtgacaggactgtagagaacatgtcgagtgggtgtccggcatcgagtacgagcattgaagggccacagagtaccctacctccgcggatcaagaggagactagctgttccaaccaaggatagtcgcgtttgtcacggtcaagtcacaaagtccagccagccaccccacatcacgctgcctgagcggtttgagatggcgcacgtcgcacccccccccccttattctgattctggaccacctcagttcttgagtccggggcatctccccgttgaataggattacctgacatgtctggccttccaccgattacctaccctgtcattcgactgtcacttagacagtggagccgagcagcggctgcggtaagtcttcctgttggatcggatttggatcttcacccaagcctgagctacactaggttagccccccacgatgccccagtcatcccctgagccggccggcagcattattggcaacggtgtgtagtgcaattgcttcgagtaagatggaggcgaggtgggcgagcaactcggagagtacatgctgttcttagctttactggcccttggttcgacgctgacaggatatccagccacgtctcatggggatttcctgcggtgaaggtcacaacaggcatgacgccgggtacctgtaggaagcaaactacttgatgactcgcggtgcagttgacaacttgctcaagaccggcatgccaatccctgaagtcttgggactccccagggctccatgttgatagtcccctttcaatgcctgtcttgctatatatccatttacgatgtggaacaacacacttggtggctggacacaagccgcaaacactgtgcggaggattttccgacgcacaggctgatacggcatccgtggtatatcacctacctacctcgtcagcaccccaccgcacctgcagagcctcctccctctgctttctcttcatctttccgcctgtctcgactcctttgctacctcgaccacctcgaccacgaaaggcacacgacaatggttatgtttcgagaattacgggctctagtcgagacattgacgcccgcattccatcattgatgccgcacgctctcatccgtctgtatctaaatacgaaaaattgcggtagccgtctgatgtccacctccatctctttttcttatcttctcgcccattcgaccgaagcttcttctccacgatggaagcccccgccgcgcacgatcggaagaagttgccgagggtacccatgtctttctctttaggcctggacgctggtccccatctgatttcgacactactacaacgagtcagcatcatccctggttgtggagctctcagcaaggaaccatagtgacgcttcatgtattgggtctgaggtatggcgggcatgttgcaaggagaaatcaaccgtgtgtcagggagccatcgcttctgcgaaccaaccggacttttggaacgaaaatttgctcagactctcgtcaactacggctttcgcggtgagcaacgagttttccttgactcgacgaactcattgacagctccagcctcagtatagctgtgttgtccatgcaatacaagcaaactcgtaagcctgctgaagaactggctaatcgacttgtcatgcacgaccattcgcgcccaagagtcggccatcaggaacgagcgactcgagtgcccataagcagacgtccacctgtctcttgcacactgccggcttttcaaacgatcaaaacaacgtaccgaatcgacgagaacgaatcccacacacccagctcgacagttattgcaaacattatctccttggcgatctcccatccgtccagactttcggatgagtcgggcgaggctcacgagccttgccaacgaggcccgacagctactactttgggggtctacgctaaaaaggaatggcattcagttccttttagagctgtctctatgggatcggcatgactcgcagcctcgaacgtccgaaacatttctagtcgccactcgccaagcaactgcgttctagtttccgtcggaaactcccactcgatcgagggacaacaacaagcgttaggccaagacgggcgccatcttgacagcccggaaacagtctagatcgcgggtttactaggggatggcgccgtgccagcgtttgaggcctgttgatgggattgatgtagtgttcgctgcatcgcccaaataactacactgaattgctaacagagaaggattcggctttagggaacagacctccccggctgctttgtcacctaagcgaacgcgggctgtcggagtgttggggaagatgggatcaaaatccagctagaaaaacgagggcacaattcaagagcaggacgacagaataggcaaaatatgggcatgaaagtggatggatctccccagcagccagctgcaaatctcgagggcaatatagatcgtgtttactacacctgcccagaaccccctggcacagcttgagcagctccttgctccttgacaacccgcctaaagttctttgggaatctcctcgccaacctgaactgctccgtttcttcttccaccgcggcaggaaggtgctccctccaggtgccagccatgtctgatccgaatccgagttttccaccccacgaccaagagatgacgcgctctgctcttgcgccttcaggggcatgcaggaggccgggggcgatgtcgaccatgtctgggcgggagtcgcaggcgtaaaagaccacggctgagcaagtgctgcagtggtagcgctggacgccttgggagctggggtagagggataatgtgccgagtctggggtcggttccaatggcggattggagggcggtggtgtcgaggggaaggggggaggtgggatcagaggcaaaggtgatgtgttttagctctgcaaaggtccaggcaaagatctcggttccggagacgaggcggcagtcggagcagccgtcgagtgagccgaggagtttgtaactctctggatcgacgaaccaaggcagttgccccccctttgactggcgttctttcaagtccctttgggcattgccggctttgaggacgaagtcgacgccgccgcagtggcatttgagggggatgttgccctctttttcgggaaggtggaggaggttgtcagcatgggaaaggagtatgtttttatcctcgggccagtatccctccgaggtgatttctttagacttttctctccagcctagccagcgtcggggtttggcggcggagggagggttgagaccgttgagccaggggactgccccgccgtcgatggtgtcggctaggaacatgtgagcgtcccattctatgaggttttggcctagtggcagtggggaggaaggggtgaggacgccggtgaaggcgaggtaattggtgacgccgggggtggagttgtcttcccagaagagggtggtggagcagtgactgcaaaagtagatgtttaagcggggggagaaggcatattgtttgaggttgtcagagggttggggagggggcccgggccagaggatgtcggtggagccgcgcagggagccggtgaggtgccgacaggagttgcagtggcagtttgttgctttgagagggagggaggtggtggggatgggtttggaggtgaaggtcagggcgcggcagtggcattgggctgtgagggtgatggtatcggtgttggactccatagtggtgctgatgggttgggttgtttgatggtgggacaggatggcggtgacaggtgcgggggcaggtcaatatatagcccacttaggagataacgtgttggttaagagatgcagtttgtattacctcctaaagtgtgggtgatctatcgtgaatacgcttgatacgcccggcaggcaaaggctgtcacccgaaaggcgtcgtgagctccaatggaaagcgcggttgagaaccaatctgacgtcacttaattggctgttcaataatgggcgatgctctctcggaatagttcctctttgggcaccggccggtaacatgagaacacatggacaaaagtagttcatctccgaggaaattctgtagtttgtttccaactacaactagaggaagagtaatccaacaactcctgagtgggaaaatctccgatccaaccatgctccagaaaagacttacacaccttgttgtatacccacccccacaaactccaaaacagccaaatccgatgtaaatgctaatgatgcccgtccgtttctgcttttgtctatgccaaccgctcatcgttgcgcgcaatggcacttgggcttgcgaacccattctgttggctgccttcgttctttagtagcttcctgcttgctgctttgtcgtcatcttcgtcgtctgtcatgagaccatcaagctcaaactcgctggcatcctgcacctgagcctcgtcactactgcgagcgtggccgttgagggaaatcatggacggggggttggcggcacggtcgtagacgttggtgaacatcatgacgaccaaaaacaccaggaaggccaagctgtacatgatcaaaatgtacgccacggcgtccattccggaaccggcaatgaatgccatttgttcttcggtagcgcccataaacaggaagcctgaggcgtagagaagctgtatttgtgtgttagcaacacattgaagtagccggttagcaaagacttacaaaaacaggaacgtattggaagctgttgatctgtgtcccgtcctctgatacgcctgccttgtccctgagcacaaaagagatttcgatgatgcgagtgacaccaacggccatcaatgtatacccaaatgccgcgtgtgtcatcgcactcgtcatcagctcctgaggatgcgccgacatggcccatcctgtaatgaagatgacaaagccagggacgaagttgcgcttgggggtgccgtctcggcccttgctcagccaaactccagcaaggccggcgctccaccaaatgatgcccatggtcgtgtgctgccagtcattcctgacccattcggttccccatctgtgctcagtaaaggtgttgacacaaccccatgcagcaataacggcgctgtcgaagaactcttggctgcggccagtccgacggagccaaacctgaccaacgagcagcacgatggtaaggaggacgccatatgcgatgaaggcactgcccatgatgaagtgagcggcacattgtcccaggtgatcaccctggcaaaagcccagtagagtgatacctccaaacagcatctgaacccatgatagcagcgggaatgcttttccgttgacgctgtgaagaatgcgaatgaagggacggatacggccgtggatgccccgctcgagatgtagcttcaagtagacgcccaagacaatctgagcaaccagaagaaagaacaacggtgtcgcggcctttgcgtgggcgttttccgggttaaattcgcggcccttgtggagatggccgaggacgtagcctagcaatgccagtacggtgctgccaacttgtagtgggacgtgccaacggcttttgacgatctgggtgtgcgcgccattgtcagcccctgctcttcgcttcgagatgtcgatgacaacccctgctacgccgttgacttaccccaagcaccatccccaagggaaacagtatcccaaaggtaaacgtctgtaaaaatatgtgtatccatagtgttgtgtcctggtatgttgtcagcaagactcgatgccctggattccaatgctgcccagaactcatgtccaacatacgattggatccagcgatatggttgacccttccgggatgttgtccccgccgtgatttccatgcgatagcgccattgggagaagtgcggcggctattgtgatcctggcgatcgaaggagagattcgagggacataacgcaacagagacgaggagccaatgctccccgcttgggtagcaaaagtcatggcgaggactcggcttcggcaggacaagcagctccctggaagaccgcttcactgtggacgaacttgcgcaactttggcacgaatgcacggatcaccggtgtcgaaaagatcagatgaatgcgggcgatgacgttactgttatcgtggggttcgtggcgggcgacggacaatgaaggtgcaaccgagaacaggaacaggaacaggaacaggaacaggaacagggctttcaggtgccagccgcggtggccagaagtttaacgttataaagggagcatgagaatttgatccttcttggaaaaaaagggatgggcttttcgatccggcctcttcggcatcggaatcttgaccaagttgcttggatttccttggacaactcggcgctcatatcgacctgtaactgcttcacccatgcagtcgggtactcgctcctcggcattgggatgcgtgattggccaagcaagcaattctgtgggtctcaatctaactgcttttggccaagcctgggcgccgggacatactggcttgtccaagtgggcatgttcctcatgtttcctcgagtcgacatcttgggagatggaaaaacatcgccagttgtttcacacattttgctcaagatgttggtgtgagtcgcacagagattgccattcggggcttactggtaacattgcgcaggtaccgtcagcttcgccaaaggtactctgcagcggccggggggggggggggggggccactgttcatctcttggcaccgttacacagccatccggacaatcagggcacaacagacaagcttttgaggcttcattaactcaggttggcaattaataataacagcgcaattattttccctgggcagcgagcttcatgtcggcctcccactccttttgcatctcgtctgcaaacacatcatcggtcaagaccttccaccccactagagccatgcctttcccgcactccaccgctctcgcaaacgcgtcctccgttgcggcggccctcgtaaatcccttggtgtggttcggcgagccctcctccgtgccgattccgaaaacaccgtggaacccggggcactcgtagcagacgtcgcccatgtcggtgctaccagctagaatatcctttggctcgtcataagagaccgttccctccggcatcgcctcgacatatgccttgcacagcgatgcgcttggtcgaacgtcggcatacgagttgaggggctccgtgtgcatctggcagccggttgcgagcgcagcgccctcaaaacacttcagcactcgctgccacagcgcctccgcctgcgcgcgtgtttggctgcggatgtagtattcgacacagcagttccccggtgtgacgttgggccggtcaccggccgatctgaagataccgtggatgcgatcgtacgggcgaatttgctggcgcagcatgctgatggcattgtacgagaggcacacagcatcgagtgcgttgactccgtcccagggcgcgatggccgcgtgcgactccttgccggtgaagtggacacggaacttgacgttggccagcatgcgcacaaaagagacgccccggatgtgggacgggaggttgtggcctggccctggatggaccatcaacgctgccgaagctcccttgtaagcgccggctgcgatcaacttcaatttaccaccacctccttcctcggcaggagtccccaggagacgaacacgacctggcaggccggatgccttgagagcggccgcaacgccaaggaacgaggcgagcgatgctgaggcaatcaagttgtgtccacaggcgtggccgatgccaggaagggcgtcatactcggcattgaagacgacaagacggccaccagagccgaactcggcagagaatgatgtctcgagcccaaaggcatggggcgtcaccttgaagcccagtgaggtcaggatggtgacgaaggcttcgtgtgccttgaactcttcatatgccagctcggggttggagtgtatttggtggttgatggatgatatctcggcgtttctagcctgtatctcattttcgatcacggacgtccactgttgagccatgttggtgaggatgttgatgaggactttgaaagggattggtgatggatgatgccagccaggagaagaactcaagttgggcaaccgtcttatatcaggttttggacagaccacaacgccgaatatcctcaaaacggtccgccaaggtctctgcgaacggctcaactctcagcatcacaaagatcggtccggctgatgatggcattggatgatttgcccttggcgctccccgccacgacaaccccaccgttctttgatggttttggtcacttcaaccaatggtgcgagagtgtgttcaatttcatcgagacggcccttcgttcaattacctactcacgctactctgccgatacctgagagcaaatgatctcattggatataccgagacgaaggagccaatcgtgaactcgacgccaggtacgcagtcacctccgcatcccccacatgccgccgaaaccagcaactggtacgccgagacacgaggcttgaaagatgtcacgaatcttggccattccaacccttgacccaccctcttgaagcagcaacacacaacgcattgcttgaacaagaccttcatctttgagttcccccaacgcccagattcgcttgaacggatctatcgtctcgatccccgcccagaacagcggccattgcatgcgatctggctggtcttctctgccggtggccaagcttttctggatgaggagcaacaaagaatcaacgacgtcggcaatcttgacagtctggggctggggtggagaaaaggccagatgttcctcagtcaaactgcatcggaagtggtagatacggagtgtataaaagttcactccagcccaatctgcgttcaacatcacacgatctcggagcgcagcatttgaagcggttaggcgtagaacgcgaagaggacctggctcacactgcaaggcctgtatcttgctcaggatttcgtcgctggcctttgtatccaggggcagctgttcatcggcagcgttattgacctcctgcacgaggacccaggtgtcgtggatcatgtcaagagcgctggagttcttcatgtcgtccacaacctcgtcatcgggatacctctcggcccagaacgattccagagtggttcttgaaatcttgtacagatttaccaaagcttgccgagaagctgacgaagttagaagcctggcaatcctcccaccttctccttgtgtggctgcttgtgcatcaatccaaaaaagccaaaccataagacgagccaacagtgcctttttcgactccggccaggccggattctccgcatctgcagaagtcaacatttggtggaggttgaaagccgtcaagtactcctccatcatcttgctgagctcactcatcagcatgcggtttcctgcagcatggcgacgcttctgatgcaggtaaaggaaccaaaaacaggacatggcattcagggggtcgatttcgcgacttcggatctctgcctccagctgctgatgcccgagacgatagttttcatcggcgcgggcaaacagggcgccttgggatcctgctcgccacgccatttcgttctgtgttgctgccaggaggagatgcaagatagctttgctttcgcgggccgtctcccacacaatagcatgagtagaccagttgggattcttcgcgctcccaaacccaaacgtcgcgctgctacggtaccatgccaaagcctcgcgctccgcttgggacggggatacgcccaaaggcagaggggcgagaagggcatcggagctgatgtgcatatccaatgttggttcgggatacgggacaggaaaccatggcatgaagtccgagcagcctaggcccgtgagaaagctgaagcctgggattatgggcaggtcgctcatcgacaagtcaacgtccggcgtccaagtggatgcttgagcctgaatgagttggtcatgtgtgtcgttgacggcgggagctaaacgtctaagagaccgactttcagcttgcgggatgtcttgccctggctggtgggtctgtagttccggaggaggaggccattcacacccggccttttgcttgacacacttcaagcaatcagggtgtcgctcatcgcatttgacatgtctagcacggcacgtcaagcagccttgcattgatgctcggtcagtcaagtggctacccaaccccacgggggatgcttaccgttcttggatctcgtcccggttctcggttcagcggaggacatagacatcttcttggtcttgccgacgcgatgtaagcgtgtacccgagttggaacttcggcgagggtgttggtaagtgacaatggcgtgatggaagtcgggtcatcaggttacctacagattcaagaggcgacccatttttatcttatcatcttctcttcacatgtcgtcccttcttcgttggcgaaggtgtgcttgcggggttgggggtgtgactattcagcctcgttctcacagagctgacccctcatggtcctggtggttgaagtgtcggctcgacagaccaatcatcttagaccgtcgcgtgaacgcaccaatcgtcttgtctcttctgcgcggtttctgcatgcaccgagaggacagggcttgaaggacaaatattgggtacgctgctgtcatctacagctcagactggcccagccgcaagcattgacacgaggactcaagccatggtgtaaaagggtaaacactttccgtctctctatcctcatacgtaagtatctgcatacaggttttcttctattcgtctgctctaacacccattacaaacccaggtgcgccactcggctagctggcttgcaccttccacaacttccaattattcctgcaatggtctctggtatgtcctatcaagccttcttgttctcggtgcttccgagtgcttgcagtttcttggcgtggaattgctgtcaaatgtcagtcgtcacgatcagggagataaagggggtcattggctgaaggaaccacttacaccatccacaccagccccaaccagcttgagcggaatcttttgcaacaaccaaggcaccggaacattgacacgggtcaccttggcatcctcatctttgacctctgggttcaagaggacattcctcggaagcaaagggtcgaaaatcgagggccttgccaacccaaccatatcgcaatcacccctcctgagcgcctcctccatcccaagcctggtggtgaagccgcccgtaaccatcaatggaatcccggccaactcccgcttagctactctggcaaactcgagaaagaacgcctctcttttcttggtgctctcggcgagcatctccctcggtttgatatcctcaaaactgcccccgctgatctcgacaaaatccagctctgtctttgccaggagttggagctgctcgatgctgtcttctttgccttgcctgtcggtttgctggtgatccacgctgtttagcttgaggcctacgacgaaccctttgtattctttggtggcttccctcacggcagcgatgatctcgaggatgacgcgggctcgcttggcagctgtgccaccgtaggcatcggttcgcttgttggaatgaggggaaaggaactgcgtgaggaggaagccgtgggcggcgtggatctggacgccgttgaagccggctttggcgaggatgagggcggagtgggcgtgcttggtgatgagggattggatttcggggatggtcatttctcgggggtgggcgaagaggagggtgcgggctatctttgggaggaggccggggcctaggtcgaggggaatgggggagggggccaaggggggttcgaacatggagcgggctttggaggcgaagcggaggagttgtttgcccgggtggattagttggactattactggggatgggggggtgttggaggaggcaggggggcggaaggaagctgcccaggattggagggaggagaggagggtttcttcggggaggttgggttggttggcaagaacggcgttggtggtgacttggagggggtcgatggctaccgagccggtgaggatgaggccccaggagccggtggaccaggaggaggagatggcttttaattggggggaggggaggttggtggtgggatcggcgcagtcttcgaacatggaggctttggcgaggcgattggggatggtgaggttggagacggggagggttaggggttgggagaggaggagattaggtgatggaggcattttgggtgttgctgaaggggcggaaggagctttggtgagtattgaagattcaaggggtcaaagcgtgatatcaggatacggtggtgtggtctggagtcagcaacaggtgcagctatgcagtgggcatggtggtgtttatacttgagcatggaggccttggtttgtctactttcgttgcccaagcggatcatgcccgttcccatgtttcccttttgacttcactgcctcacttccataaggcacgcgtgtcacattgggtcatacggcgggcctcggtgttgacgctggaccttcaccaaagtgtccgtttagcaggggttttctttcgagatatttgtcaaacggacaaacttttccttcttgtctaagaagtcactcatcgaggctccatatctcggacacatatgatggtcagggtgaggcatcgggtctcgctttgcttgtgtaagccatcgcgcgcgggttccgttttgggactagcggctgtgcaaccccaacccttgacacaaagtcactacagccacttgttgatgccaatgaggacaatgttgggatggttacaccagcggcctacaatttctaagcccagtaataagtgccgttggagtgggtcttctattcggtcagtactgaatgctgatgtttcatcattggtggtcttgtcttgtgcggagacttttatgtttggatggagcaatcttcgccgctgatgaagaacaccgaggtttgaaagcgaggttgcggaggttttcttttatcacacttgaaggtttgtactccgtcaaagcttggtgcagacgaatagggacacgcctatttgatggcagagtgtggggggtggaggcttgtagggaaggaacgttctcttgattacaccccttccaggcactgttagtcccccccctggattctgcatacaaaaattgtcttctcgactaccctctctaacagatggctgaatgggggtgggactgctgaggctcttgctgcttcatgttggggggttataaggtaacctggtaagtggtcatgttgggggagtgaaggtgggaagtagcgggaccggacgtgtgtcaatgcaagttccagtgaggtgcgaaggcaagttcaagtgctgttaagggcagtggcgtgacttctgttgatgttgtgaaggaaggagagaatctgtcttacacaacagctgagctgagtgccttcctttcagtctggtgttggcggcagttgctctcactgctgcctgtcccttcctgtcattacttttgctggtaaggcagttgcgtcaagccaatggaatgggtccttggcacggttgccgttgctgttgctgttgctgctggagtacttgcagcagagcaatcttgaattaccagcagcgggttttgactcgacagcaactttgatttgacagcagtttttctgacagcattttggttaccagcaactcaactgctcttggccctgccagcagagagccattgcagcaaagcattagctttggtgttggccttcctccctgccactggtgtggtgccgactgatatcctttcgaggcagtagtttgttcagaaagcacattcaggggatcgctccaccttaccccttgcattacttgcccggcttgtacaacgtcagaaatgttccggctgtttgatccgacacagtggctctcctctcagattcatggtgttccggacccttggctaaatgacgcttgatcacttgaaccggtacccttattaacggctcattgtctacacggcacccccacatacccccatcaccataatattcctcgattggccaaagtctgaagcaaacccaattgatagttggagagcatcttttgctcgttccagtggacttggctctgcaccacacagcagacaacaagctttcgcgctatcaccatcgaacgtggccaagcaaaagtcatcacatcatggagttttactagctgacgcctttttacaaccctgagatcaaattctcccttcgcacaatgactcttttcaaccctcccgttatgagatctgtgatgatgctcaccgggtaatttcacccgcgcaatataggaatcggatgaggaattatgcagccatcgaccatcctggccccacgcagtagagatttgtccgcttacatgttgcatgtaggactcggcaggtgaaggtctcgaaggcttttacacatcggatatcttgtctgcgcacccgccatcaaggcttcgccaaggaataccacaacgcagaggcagagccgccatctacacaaccacatggcaagatctgggccagccgccgctgctaccccacgaatgcctgttccttaccacccagtaccgcccgactggttatacgcacatgaacaagtacggacacgaacaaacgccacaaacaccgcagctccctggcgcagcccgcaaccgatattgctcctcccgaggagccgtcagcttgaggactcggggtttactcggtcggtaccatcgtggaagatcggccgagatcccctgctgttcccctgaaaggcgcgtttcccacgttcccgtatatggcaccaacaaatgacgctgcatctcgagattaatcttccgcaaatctccccagttgcacaccacaggatcggctcgcccaggaccacatacactctcgttccgggctcgtctgttgttcctcgctcacagcctacgttccttaccatcagccttgaccatgttaatctattgacaaccggcaaaacgcttgagtgatccgatcccagtgctcacaagatcacaatctcaaaaggcaagaaaatcagatttaaacatggggagaccgccatacgatctagtgggtaaagtcgcaccactcccattaccagtctttaccacggactcaccagccaccgcctgtggaagcggccgacgagggcaagatatcggctcatcccgtcgatgagtatatttcgggctgcattttcccagattctcaagccacttccccaggatcttaccccagacgacaagaagcgagtcccggagatctccatcgacgtctgtgtctgcccctgattacaaaaggttttgtcatacagctcgcctgcatcacgttacaagtcacaacatacgccgcagatctctcgcctgatgttaactctcgcccccttttgcgccctgttgggcttggcggcaacctcatatgccaacccattcgacaaacaagacgcacttaccgactgcctggtcggatcaggcgttccaatcaatgcacctggttcggccgattggaagcttgattctgcccctttcaacctgcggctcaattacacccccgtcgctattgctgtcccaacaacagccaagcacgttcaagatgccgttgcttgtgctgccgagcttgggatcaaagccaatgccaaatgcggcgggcacagttatgcatcattcggtctcggtggcgaagatggccatctcacgattgagatggaccgaatgaacaaggttgtcctggacaacagcaccggcattgcaacggttgaaggtggctcaaggttgggtcacgttgcctgggagctctaccagcaaggtaggaggggcttcagccacggcacatgtccagggtgagttgtgatttccattacattgaattcagttgacagaatagtggggctaaccagaaagatagggtcggagtgggaggtcatgcacttcacggtgggtatggtatcagctcccacaccaagggtttagctcttgactggatagttggggccaccgttgtcctcgccaattcgacaattgtcaactgctccaagacggagaatccggacttgttttgggccatccgtggtgcaggatcctccatgggcgttgtcaccgagttcaaattcgacacctttgaggtgcctgagaaggttacctacttcattgcgccagtacaatggccaacagaggccagagctttggttggtgtccgagccgttcatgagtttgccaagactatgccaatggagttgaacatgcgtttgttcatcgccaagcgctttatcaacctggagggtctgtattatggagacaaggcaggcctgcaagctgttctcgcacctttgcaaaagataaccaacgcaacactcgcggtggccacaacaggtggctggctggatcaaatcaaacactttggcaacggagtcaacattgatcaggggcacaatctcgcgcaacatgagactttctactcgaccagtctttacaccaaggctttgagcgaagagaagctcgagcagttcgtcagctactggttcaagcaggccaagtccaatcctagggactggtatgtgcacattgacttgcacggcggtgagaactcggcagtcagctctcaggatgacgattcaagtgcctatgcgcaccgagattatcttttgatgtaccttctgtatgaccgcatagacaagggcacatatcccgccgacggccataccatcatgagcaactttgcccgcaacatcaccgagggcctgcccaaagaggactggggaatgtacatcaactaccctgactccaggggtcttatggaccaggaaacagcgcaggtcaattactggggcaagaatctaccgagacttcaggcaatcaagaaggccgttgatccgaacgatgtctttcattacccccagggtgtcttgccaactactgatgctagaagtctttgagcgagacctgacattggtggaaaggactaacggtgtgaagtcagggagatacccttgtatatatgaggaatgggatagacgaaagattcattcaaataaactcgcagttttcaattccaaggatatcaaagcatctgctccaagcgccttacaaactagcaatctcacatcatgtttagaaccagccaaacaccgaagctaatgaatgcgaccttcaccaagcttccttctaacctttcactgccgctagtcacttcagtcaaaggccctctagggcttgcgacggttctcactgttgtctcatttccacccacaaacgccctagtcacattcatcctagcaacccacccctccaaaaacctcttcacagcccaatacgccggcttcctctgataatcctccgtccaaagacacgcaccgcccttccctggaaacgtccccggcacccagctataccgatccgtaaactgccacaccgtcaccccgacacacctctctacctcgagacacgccctcaccgcaacaacataatcacttgcctgctgctccaccgccagctcactcgcagtttccacatcctcttgcgccacatccagctccgtccaggcgacatccacccccagatcagcaaacctttgcagagtcgctatcaaactctccacgctcggcgtctggccaactgtgaagtgagcctggagtcccacgccatcaattttaacacctttactctgaagcgacttgaccagttcaacagcggcggtttgcttttctggtgcggtctcaaggttgaagtcgttgtagtagagcttcgtctctgggggcgctacctcccttgcaacctcaaaagaatgagcgatatactcctcccccaacacgttgaaaaacaccgagttgcgaaatgttccgttttcgtttagcgcctcattgacgacatcccaggcgtagcaggcactgccaaagtgggagattaccgaggtgatgtgtgttgtgatcaactgtcgtaacgtgtctggtgtccatgatgtggaggagacaaagggggggagttgggagtgccaggtcagtgtgtgacaacgcaagaggtggttgtagctgttggcaagggaggcgacttggtcagaggcgttgaaggaaaagtcgcctggttggggctggatgagaccccatttttgtgagttttctggggtgagctggccgaattcgagggggttagagaggatgttttggtaggttgggtcggcgaagttattggtttcggtggcagtgccaaagtagagttttccggcggagaggaagagggagtgtaggccggtggaggggggttcgcggttggattgggcgattgttgttgttgccaagagggtggtggtcaggaggacggatattcttgtcatggtgattatggtgagtgttaatgactcgcaagccgtttgtggcttctgttttcaaatgtcaaaatgacagcttctctgtattttcacctgttttacactatcgctaacagtgaactgtcgtggacaactcgaggggtgagcccggttcttgtatgtgtgccgcttttgatgggcagaagatctggggtattttcatgcttgattcggccgatttccggattttttgataagtttaattcacctttttggtcactcgtttgatctccatctagggccgtgtttaccttgtcggcgccaagtgagcgctcagaacaatgctcaggccatcgacgtttcagacgaagaagcagcctttggagtcacgcatttggcaattcaatgctttgaaagcaatgcaacagaccacaaaacttcatatatcactgttccagctcagtaatcaccaccaacccattgtttcacatgtgtgagagctgtagttatgacctctgaaagaagaagcaaaagggactctaaccctctatactttttaggggcaaaatggtttcaggtaacgaagtctctttcactagactttgcagtacagaaaaacatattaatgcgttgcggctggtttttttctattttttctttccttttcgttattaatgctccatttgattattggcagttccaggtttccagagactttgccatgatctgatgataactggttacccctgaacccctttttacgccttatcagcccgcagtctgcaaccaaggtaccatgggcatccattggccaatggacaatatcttgcatcaaccaccaccaacttcagctgcactgtgtcgactgttaaagatgtgcaggttccccgctgccaagttggactgtgccacagctcggttccatccccgtcctttccacggaagtatcgcgccattcgatactggaagaaaggtgcgagtagccgagcgaacatgcatgcggtttgggggtcggagctcaatcaggacgataaggtgctctcaaatgtgggcaccagttggtttgagaagccgattggtgggggaggggatagattgcgtacgagatgcatgtgctgtcgcgcaatccggaccaacgcccggacgccttgtcttaaaccggtgtgcggatgtaacgacggcagggctagcgcccggtgggattctcacaaggtcaaccccgtcacctgccacatgagcgagggagttttattctagaactgctgttcaccttctttcccgcaccacctcgcctgtcgatcatcaacagcacagcaacaatgaccgaggaaaaggcagcatctccagcccccgaggcggccaccaaggcccaatcaccgccacctgccgctgcttcgtcaccaaccccagaacctgcccagccagagcctgcccatattcaagctgacgatgaggtgcctgatgacactgatgtggactcgtcgtggggagaggtaggatatcggaccgcctctggtcacattctattccttttgctgacaagccacaggacgccgtctcctcgactgctagcatctctagttccatcttggactacagaaaagagaacgggcgcacttaccacgcctatagagacggaagttagtggcagccaagtcttgtgacaggtggagaacactagtggtgatagtgatactaacacaatgtaacagaatacctgatccccaatgatgaacaagaaaacgagcgtcttgattttcaacaccatctttggtatctgactctcgatggtcggttgggattcgctcctcccgctcatcctgaagccaaatttgctggccgggttctcgatgttggcactggtacaggtatctgggctattgattttggtgatgagcatccagatgcccatgttatcggcgtcgacctctcaccgattcaaccgagcttgtaagcgcctcggtttcttgcaatggagaaagaattataggcaactgctgacattgagtttccactacagcacacctcccaatgtccactttcaaatcgacgatctggaggacgaatggaccttctcacagccatttgactacattcacgttcgcgccatgtccggttcaatcaagaactggtctgcgtttcttgaaagatgcatcgagtaatgagccccacccaaaatctttctcaattgcttctgacatgcgaaaatagaaacttgaagcctggcggttggctcgaagttcaagaaccgggcagacccattgccgacgatgacacattcccccctgactgtgctctcgccaaagctaccgctctttttgcggaaggactcgcagcagcaggctcgccgcttcttgacgtcttcactctcaaggacttgttcaacggagccggctttgtcagctacgatgaaaagcgggcttattggcccagcaacccttggcccaaagacaagaagctcaaggagatcgccatgtggtccaacacaaacctctccgccggcgttgagggtttcttgatggcggtggcgacacgcttcttgggctggagtctgccagaagtcactgttctttctgctcaagcaagagctgatctcaacgacagaagaatccatgcctattggccagtgtaagtttgcctgagggtggctgttgatttggttcaaagctaacaagactttgcagcatctctgcatttgcgcaaaagcccgagtgaaaaacacgaggatgtagcttgctttttgaatacccattatgtacctaaatgctaccatatatctaacgtctattaagcattaccatcgtgtcattagtcgtcgttcccaattttgagtcccgcccccagtgcctatcttccagcaattgaaataccatgccagcttttccaacctttgttgtctcaacctatacagcagatatatggctcatagtccgacccaacgcggcctcctcccgctgtccttcagtcttgagtgctgcggaaaacttgctagcagcacgaattttatcaccataagcaacaaaacacaatggaacggctgccaaagctgcactgataccagcaagcaacgcacaagacttggcaatacccaaagctttgagcatatcttcgatagcgagtgggaggagagcaccagcaacactacgcgtggtgcccaatgccgccagggcagaggcagagtagataccatacgcatccgcaacgtactaatcttgatgagtaaaaagtccaggatgcttgtgaaagtgagtactcacgttgatcattgctacccacatgatattgtaagcaattccataaggcacagttgcgataaaggggaccgcccaatgcacatcggaccgagcagacagtccaatccacagtattgagatgacgaaaaacgggcctccaatgcaggccagagggaggcggaagtactctgctctctttgtagggtgtttggcgctgagccgaagagtgactgggtcgcaccaccagcagatgaagcagccgatgatagttccaagaccaacttaagagatgataagctttgtgctaggtaggtactgaaaacagtagttgggaggagcacttactgatcataaacaatagccctgaaacaccaggactgaatccgtacacgcccacgaaaattgcgtaatagatctggaccatcctgtgaccggttgtcagtataattcaacgcatgaagatccagccgacgtacatgtagaacaccgagtaaataaaaccgatgtaaagagatgtgagaaccaccaccatctctccacatagcaactccaacgggcgcagcaaggttgttttctacccctatttgtcagccccattccccttaatcctctcagggatacatgtcacaaactcaccaaagtgacaaagacactcttctgactcaactccgccggcgccacccacctcctcccatcctccctcggctcctccttattcaacctctccgccttcctcttcaaaatcttggccgccaacgtctcagggatggccaacactgaagccagcgtgactcccgcaaagatcaacgcgatcctatttcctcgtcagcccccctcatctctttttacccataatttctgaaaatactcaccaaaaaacccacctccaccccaaaatccctcccacaaaaccccccaaaactggcgcccccaaaggccccacaaacgtagaagcactccaaaccatcaacatccttccccgctgtacctcatccccaaagcaatcagctataacccctccaaacacactcaacggtggactcccaaaagtcccgcacaagaacctcatcaacaaaaaactccaccaactcggcgcaacagacgcccccgccgtgctagccacaaacaataagaaacccgtcacaagaatgggtttcctcccgtaggtttcggacaagggcgcaaaaatgataggcccgaagcagaaccccatcaggtagagcgaggcagggaggacagattgggggccgacggggacgtgaaattcagcagataggagggggaagaggttggccgaggcgatggtggagcccattgttgaattgaggcatgtgagggtagcgcataggagcaggatggatttctttttctgtttagaggggaggaggtatggttagaagagcaaagggggagaagagaaggaggaggaaggatgacgaaccatggaccagttgtaggggttctcggggtcgttaggagagaacgacacaacagcgtattcttgttggtcgggtggtgttggtgaggaggcgttgtcgtcatggttggatgccagcgagatggtatcatgagtgctggaaccgctagaggaactactgctgttcaccaccggaaaaggcgtaaccttttcctccacctctgctttctccatcgttgaagctggggcgttccaatgttaaaataaaaaccaaagcaaagcaagttgaattgcccaaaaaaaaaacacctcaaaaaaataaaaagaagttacggttgcatatatgtaacaagacacaagcacaacttgtaaaacgagagcacgaaattaataaaaagtcaagaccaagagtcgtcaacttgcctgaggagtgggtgagtgtctggaaacaaaaaggagacaccaacctgtccctatttaaagccataacaccatgcactccgcattttcattctccaaccacccgggacggaagctaaaaaccaaggcccatcagtctagtctcctcgttctacagaaacacaatacagtgactcaattttccgggactccccctggccttcctgttcaagcatggaagcaaagctggtaagcggtcccggttgcccctagccaggaagaaatttcattgctatcacaggacaatgtagtatcgtaacgtctgagcaccggaaacaagccgtctcctctgctgcttggtcccggtccgatgacggctacactccccgccggccggtggtgcccttccgccgaccaggggccattagcagtctgggcggtcgtgggaggtggggtcttgaaggaaccgcatccccggaatcacctagcaggagggaagttccacaggttcaaggtgagatggttcgtggaacatgggatgggaacaaggactcgggcagacagggtgcggtacccccagagatcaaagatcgagtccagccacgaaactcgagacgggtctcgagtcactccaacgtgtgttggcatcggcgttcctgagcttgtgtactcgcatgttactacgctgctagcgaattaaaaaaatgttctacgaatacgaacgtagcggtcacagagttgaaggaagccgcggcatatgggtcaacttatccggaattagtcctgttgctttccgttagtcatgaagatcatcctgtgggttgggtgaccatggcctcgaactcgaccttggcgttttctggaactcaatgcaagtttgggacctagcggctgttgaaactgcccaacctccaacggtgattggcgtctcgatctgagcccaccaggtggatgatgttcaaggctgaaattgataaacagcccgatttggaaggttttcagagtgcacttacaccagaaaagtgggtatctctggtccgaagtaaaccatctgaggtccattggcagcgcgagcttcatcaaaggatgaaaaggtcctgtgtttgattggtgttgaggttgtaggtagacccacgagccctgggtctgttgcgtcatcagaccacaggggagctatcagagccacaacgaatgagcggtgaaagatgtatggatgggacgaattttgatgcttgatgatgtccttcttcaatcttctcaggaccttgaggctagaacccgtagcagagtcggcggagagttcacagtgagaaacgcacaatatttccccagtcatgtgcagaaccagccaagtttgccatattgcagataaatccccggcaggctgttcctctttgcgcttccgattggccccaagtctgcgcaaatggtcacctgccatcctgatatcacccaatattcggcgtaaacctggctggccgaccggcatgccatcggaggggcaccaagcgtgctgctctcgaactccgatatcgttccgcttcagcgctttagccatcagagaacctcttcgatgttccgtatcttcaagggcgtatcactgggttcgacagaccgccagttgcgtgagcgatgacattacaccaatgcctcgccaaactgtctcgatcaatccaggccacccttccagaactccagtccaaggctcctgtgcagcaaatgaatagtcatgactcatgggaggtgccaaaaatgcaaggtaaatagaatctgtatgtcttgttcctaaacgggtcaaataatccgaccaccaaaccgtcaccctccatctcactcaactccctcaaacgccaaacccagccaggtatcatatgcaaaaagaccacgacaccgctattatatagttgcgatgcgttcccacgttgctgccacagccataaaaccccaaaacgcagtcatcttctgactccgtgattgcacctttgtatatcgaccacagccaagatagaggggtgaaaaacacggttgaaaggggtatctcatcaaagtcggaaaccatgcagagctatgaaacaatagaaagaagtcggttgtagagcctcaaaacgaggttgatcagtagagcgacaatgccgaccacggcataaatctggaggaactcaaacttgtaacgagtgcgaacctcggtctcgagaaagccttcctggttcttgttggcagcggtgggcgggctcgcagggaaacgaccagtagagatgtactgctccatcagagcatccttctcataccaccgctcccggagccacacatcgaactgttcggcgctgtccaggggaatatccgcaatacggaatcgacgccagtagaggttgactgactttggaggttggccgcggaagtaggtacctgagagagtaaaaagctgctcgccgaacttcccacgactatgacaaagtgacctgtcagagacacatcacactctccacataagggcaatggaaacttacggtacaccttcgtatgccacagtgcaatcgtatacatactccacagtgcccttaagttcgttcaggcaaaagaaactaccagtgcttctcgggagaagcatgtgctccgggtccttgactccaatcttctcggcccacctcgcagacttgtttcgtccattttgcgatgcgtttgtgccttcggggaagagcaggagccacattgggtttaggtatttcgtgccatcgggggtcgtgttgtatgttttgagcttgccgagacggtgggccaggcgtggctggtcaacagccatcttccgggacataaagatgaagccatagaaaaccatgccaagtcctgcgataggaatgtatttgagtgattccttcaagatgatgtagacatagccatgcatctgagggctattggcgtacccgatccaccacagatatagccagtcagtgtagatctgtgcgttgcggttagtcagtctggcaacagcgcaacaggaaaagacactctacctgatggttggcaatcatcaccatgcgctctggaaacgaaaactcaaccctaccatccttcgttttcttgatctgatctgccaccgaggcatccccacttatgcgtatcgtggtggggccccaccagtttgtggaagttgtgatcagcagcccaaaagactgtttcgtcaaagccatataggagtagtagatatcatggtcgacgtagtacagcggcgagccgatcagttgtgcaagatggatactgcaaagaccttagttaacgacgagctggaagaaggagatgaagtgacgagacctacgcaatacagccagccataaaatagacgaagaatgagaagcctctcaagaactggaccaatttcccgtgcttttcctttccagacggatgggctggagcaacggccgaggccgccgctttggtattaaccgtcattgctaggtcccgcgacggcgggcgagttacaacaatgtgttggacttgtcggcgggtgcggagtgcggagaggagctggaatacgctgagatggcagttttctcgaagctattttatgggtgaggcttgtgcgaggcagcaacaggtgcgaaggtttacgatcgtgggagggtaatcgtaaaggcaaggttgacggcaaggcgggcagttgataagcgatacgagggagctgatgcgggagacggttaggtcaggctggcgagctgtcgaagccaccgttgttgttgggctaataaggtggttagtcgtagctcatgaggcgcggccggatgcagtgcgtgcggcgtgaaggtttcccgagactccgaccccaactggctgacatggaagtctacctgtcaaacagcttttcgcacagttgggcttgaagacatcgtcaaagggccgaggtgttgagatcggagcacacgggattccccgtccttgatgaaacattgcaactccattcagggtgcctatccgaggctgccgtaggtgtcgtcatgtgtgcacatgcgcatcccacctcgtttgtggctctgaattccgtccaggctccaacagcttggatgcagtcgccccgccagcccacaaccagcaacttacactaggcgagctgggcacctgcctgtgggtggaagatcagtaaatgccggctccgacccgaggagacagaagcttggttggagctaggaccaacggccaagccgccagcggggccaccggcaattctgacgttttccattggttgaagacagtgtggtcccgtagtatccttatcgatacggataacgatgtcatctcccggtccaagtgctccccaaagaaccgaagttcttcatggaccctgagtgcatgaacgagtgctcaaagccgccgacatacacccactagctttggccattccctctgtcgactgtaaactcgtcttcgggtaacaagatttcccaaagccacagcgcagctggttagtcggccagtcgaacatgtcaccatgtcgaggttgtgttgccctgctcaagccttcgccttgctgaacacaaccagcaaggtgaccaatatcacccgatgcagacttaaacttgcagcccaaccatggcgggacttttccgtctcaacaaaccggaggcagattcttgacgtctgaaccttgagtaatcgcattgtccctcactaccagcaaagcgaagacggcgtcgctcctcgccttgcactggccggagccaccagcgcaacatccttgctcacacgcaacatcgattttatcgtgcccaagttgcacgctcctcacgttaccgtctcggccgtcgaattcgcaaagcacatccacaacaattaccctgggctcaacctcgtctttgagagccatgttgctcacaccatacacaaagacttgccattccccatatattcggccgctcctgctgatgctacagcactgtatgccgacaaaatcgacctggttaccactatgggtggtgacggcaccatcctacgcgccgcaagtctcttttcaagccacttcagtgtgccaccaatcctggctttcagtatgggcacccttgggtttctcggcgagtggaagtttgacgaatacaaacgagcttttcgagaatgctatatgagcggttgcagcgtctcaaccgaggatcttggggatcctcatacccgaacagctaccaccagggccatcgatggtctgccagaccccgagggctgggatagtgtacgggggaatggaaaatgcatgggcttgaaccgtacctccaagatcctcctccgaaaccgactacgagtcggcatctacgacagcgaaggccgcaatatcaacgaacacatactacctacatccacagctgaaccatccttgggtctcgagggcgaaccagtgtttactgcgcagtcttccacggctggtgcagcaggaggtaggggcggcaactcaccatatttgcacgctatcaacgaagtctcgatcgatcgtggatcgcatcctcatctcgccatcattgatatatttgtcaacggccatttccttaccgaagctgtagcagacggtatccttattagcacccctacaggatcgacagcatactctctctcggccggcggctcgattgttcatccccttgtgaaatcccttcttatcacacctattagcccgcgaagcttgagtttccgccctttggtcttgccactgcataccaaagtggtgttgagactcagcaagcggaaccgaggcagagagttgccggtctcgatcgatgggaaacgacgcctaggggtgacgattggcatggaggtccgagtggaaggggagaagctggagagaaccgaggatgggtggaagggtggtgttccttgcgtgattagagcatcgaacaaaaacgactcggaagggttcggagaggacgatgactcgtgggttggagggttgaatgggctgttgaagttcaattatcctttcggctcaggctcctaaccttgttggaaggagcttaacatttcgaggattgtacgtgtgtatgttgtacgacaaaagcgagcatgtcatttgggtagggatagggatggcgagcggtatacgggaccgggtcggcgcgctttgtattgtcatttcctttgcatttatgggctttgcatggcatttgatatgaacacttttgatacccttcaatgataatatctctactgtctacactccttttttctcctgcactggtgcccatcattttcgacacatacctagctcctcaaagagaagctgatcacccaaattccccaaaaaaatataaaggaccaacaaaagatatcgtcgcctgcaggattcgaacctacgctcccgagggaacgccctatgcaactgtgtggatagaatccatacttagcaggggcgcgcgttaaccactccgccaaagcgacttgttttcttgttgaatgatgagtcaatctcggaattcatgaaggatggtccacagctggggtggacaccgtcaacgtggctgcgtgtaagttgtggtaatggacaaacagccgaagcgattggtagggacaatgtcaccaaattgtttggcaggcaccccgccccggcttatcgccatttggatccggagactcgctccaagacgaaaaggcgagcttagtccaagtgcgaggtcgtcaggttaggcatacggcacagcgccgaatggttggcttgccgttgcattggtcatcgccgggcgaatttacctccgtccatctgtggccggccatgcccggcaggggtcctaacttataagctgcatctgccgcgttcacgagatgatgcaaaatagcacttcaactgacagacaaaaacaaagttaaattctttcttcaaaatggcaccccccataaccctcaaccgtaacttcccccccacccctaaccacgtctggtcccccttcgtcaacaaactcgagctccgcctccgcctctcctccatcccctacaccatcgcctccggctccctaccccaatcccccaacaggaaaataccctacgtgtcctaccagccctccccaaaccacacccccgaactcctaggcgactcaacccttatcactaagcggctcatatccgaccacctcctccccgacctcaactctgccctttccccggcagaaaaagcccttgacctgtccattagagcactactggaagataaactccagttcttcaacacccgcgagcaatgggtcgacaactactaccccatgagagaaggaattctcggtcagggaggagcgggtctgccatgggtgatgcaatggcttataggggggaagatttacaaggatatcatccggacgctctatgggcaggggacagggaggtactcttctgacgaggtgagggtattgaaggaggaggtgtgggaagctataaatgcttttgttgtggaggggaggaataaaactctagcccggaggagggggaatggggataatggtgacgataagccgttttgggtcttgggaggggaggggcccacggaagcggattgcactttgtatggcatggttgcggggaggttgatgtgtagcaggtgagtttcgctctgtgtcattgaactggatggatatggctgacggcaatatgcagcgctgctcctgagacggggaggttggtgaggggttatcccgcgttggtggagtacgcgaggaggattcatgatcgatactttgaggagtatgatctttgggaggaggaaatctaggtttgccagatacaatgagggtaaaaggagaatatatggtaatggagttggaaaaagaagcaaaagtggatgcccaataacaggattgaactgttgaccttcgcattacttggtactgtttccagtattagtacgacgctctaaccagctgagctaatcgggctactgatttgagatgttttctttgaggaaaatagcgcacatgagcaatactcgacacaggagccgcatacaacgcatataacacgttttcgttagggttgccaacacacatgaccgtctcatgtaacttgggatgcaaataaacatacagattttgtcttgcagtgaccctcctataggtctgcatcaagagcaataacgttggccgagacaaatcccgtaacaaacaaccgcgccttgctcttgccgagagagatgaggacagcagcacttgcgctcctgatcctgctgctgtcatcctcaaagatcacccttgtctcccactgctgcgccttcacacctgctgaaggcttggtatagaagactttgacaggatccttgccagctgggtctctggaagtctcggcgagagtggcagcctttgagatgcctggcaacaagaaaccactgcggtcatccgaggggcctgtggcgagagggtccttgaagtagctggggttgtcgacaacagagtcaacctcgagcgtgtccaaaatggtaatgttgtagtttgagctacccttgggtgggagctgagcaatgtgaagggtgccactagctgcttgtgcgatcaagatctcgtcttcggtccggccgtggccaagaccgttgttgttgtgaactccggcgagggctacactggcactcagaccagcgtctgatgtcttgactgggctcaaggaatcgagcttgatatgcacagtgtctgtccacttggctccgtaatagacatcctccaacatgcgcatgatgctatggccggtgtagtaatgatcgttcgtggcatagacagaagtcgggctggtggcatagacatcatttggcgtccggatcagagggtgccaaacagatcggatatgtctgatcgtgttggtgccgatcttgtggtggaagagttcgatttgggaccttgcctttgcctcttcgccttccgcggtaggggtggggtcaggaaggtggttgatggcaaaaatgtagacggcctgaccagtgggcaattcggggtcgtcgattacatcaatgccgtgggtgatgaaagcaccgtcgaagttttcgaacttgagccgtcgtgattcaagaccctacataaggacggtcagttgtgttgtgacaagttgtttgaggttggagctcaccttgggatcaatcacatggatggaacctctactctcggcggccagcttaggattatccaagtttccaagcgggggaaaccactgaaaccgcgtactaggatcatcttcgcaggctgtgaagaggagaccgctcggaacatgatggtgaagatcctcgcaatgcgttgtgtcaggaatagaggtcacttgctgcgtggtgcctatgtcacccgcaggatagcttcggaaaacgcccagaacagtcactgcacgttgaatcagagggcctagggcgtagaactggtaagcgagcagagccgcaatgatagagtataccgccgacctcattgtgccggattgtcaagaaacatgaggttgaagaagagaaagagacctttcttccaagcgattcttgatgttgggcacgtccagtacttctggcgtcattccactgcctcggcatcatccatgtccacgcggggtaggtcaccgaacatctttgttggcgactcgcagttgtcggggaaccatttccggattttgacgaattaaggtcgccattgtccgtttacttcaacgagggacccaaaagtcaacaaactggaaagcgaatcgtggcacctggaagcgagacccagactcctcgattgcggggtagtggaacaagatgatgatggcttatgtagaatgttagcgcacgggtatgcagtcaatatctgtagtgtacggttagactccaacgacatgtgtgtgcctcacaaaggtcatacaatacaagactgggtatccagaatcgtgatgattaggcaaatgccttctttttttggttcaatcctttggaataccaccaatactcggagcttatggatcagtcagggacaacatgtggtggcctaaggatccctgtactcacccctccacccaccgaagctgccccacctcagaggcttggtcttggcagtcgccccgcgttggttgcctgacattcattcaccaccatatcagttcctctgttggtgcctcgcaggaaaacaaatggaacatctctatcagcatcgcctcacggatacgccgccagttctccttcctacttgagctcgatcttcacgctacatggcagacaaaatttctgacaccgaggccccctcggggataacagcctcgcgtcttttggaccaactcgagtcgcccctgtttggcaagctacctgccgagttgcgagctgtcatctataccgagatctttggcggtcaacgcatccatctaaatttcacaactcaccccattcgcgctgacagggtaggtctcaggaagcgctggcgccacgccatctgtgagcagccagttgctggccccttcagcgaggttacatcacgccagcatcactgctttcttgccagtcgccgacgagtgctggatatcaaccttctcttcacttgccagcgagtgtaagtctttgctgtacaaactctgggtcaggtaagctaaactgcatgtagatttgaagaagggattcccatactgtatcagtccaatacctttcacatcgtcaacattggcaccgagaggcttccgtcagatgatctgcggagccttcaagtaaaaatacccaagaattgggggctcatcagatccttggagttcaaatgggaagtcaacatttttgatcggaaccaccccaggtttgttccgcatcactgggggcgtgatggctacgaagcattctgggacggtctcgccgatatgccgttactgtctcagctgcgtatttccatcatcatgccgcaaatcctcatgctcgcgtcgcctgaggagcttcgaaagctttattttgagcctataacgcgcctcaagcatttacggatatgtgaagtgatcctaccgagatcgtacagctcgcattttggcatgagcccggaggatcagcgccttcctattgatggagatggcgattaccgcatcagctgggccactgttgatgatggacgtccactggctgctgcagctgccaaccctgcgtccattcaactcctgcgaacagctacttcccacacactgtcagcgcctccaggctggtcataaggattcatctctggtttatttgaacggaaactgccgagaccacttcaagactatatatgcactggggttcccggtggacactccataatccaatcaccatctgcttgggcaaaccatgatgcatccatcatggactgatgtgcaaacttcggtggctcagccgcaacgacccagtcttagtggagggttggaaggaatgtgccgcaaaagccactcatcaccttctttacacggcccagcctagacatatcccgaagccgactcccgaatctggtctggaggagacttatagagtactaaggaaatatcgaaccgatgccagagagcacaatgacacaaaatccggaagtaatgcagctgtgatcttaccctggtcctactctgtcttacaggatgatacataatactcgtgtggttgcgatgctgctcagccttatcgccagccgatgtaacctcaacactcgggcatgctctgaatagggcaagctcatttaccgaacgcttttctgcagctccccggtctcattatgagtggctgaaaatacgtctgcatcccgagtccctgcagaatgtggacaacccggacccagcctcattggcctggcacgtctgggctgtgtccaagacagcggcagccctggtgctgactgcacagtacggtctgggcatgttgaggatggttagctgagacaaagctagagtctctagtaggcatgtttcttcgttccataaatactgcgccgtcaccatggctggccggtccatcatatctcttcaccctctactcaactaccagtcaacatgtcacgaaacttggcagaaagcatccccttagtgaacaggctttttgccttgctcgagagctattggcaacagcaactggacccggctctccccacaccaccagctgagatcaaggccatcgtcccaacccagcaatcgattctcaaacacctctcagagagagaatatctgaagcagttagcaccgaagtctgtcaaggatgcctcgttgttgtcatttgacccaggtgtttttgacaatgaactcctgaagttgaagctttactctactgtcgaccctaaggatccctcccacgccaaggagcccgaaggcgacatcgtagagggcacttacatggggactcagattgctctaacccaagcatacgccaaaatcgaacaaacgtgagtctctcctcaaacgagaatgtccgacagatactcacatcatgtcctagattttctgcgctgttcgatgttctaggcattgagccaacactgcctcggtatatccccctcgaggagcagaagaagctctacaactactcggcgtaccccaagaatgcggatggaacgcctgcgcagtatcctccccaccttcagacgatccctccggagcacagttacacaccttttggtatcttcaacgcgattgggctcattgagactcaagtcattctcaagaagatcacaccaacagaggatggtctggttggcaagacgaaagagtggctgcttgagaaggccagggcagcagcctttggaggcgatcctgagaaggggatcaaaatccaggacgttgttgactacaacaaataccaccgcaaattcggcactgacatcagcaacggcggaaatatcggtcttttagacgactggtacagcgatcgtcggtttgctgatcagcagttcactggagtcaaccctaccaccattaccaaagcctcgccagcatggattgccgacttcaccaaggcggccaaggatggtgggtacaacaaatggctagacttcttcgccaaggtggacaagtcttccctatttgtgcaggacggcagttactttcgcaaggcttttggcatctcaaatccagaacaggtgctccatcataaacagcctggaagcgatgacaactggtgtgtcggggcagtgaccctgttccaacttcatgatgacggcaagctgcaccccatcgccatctgccttgaccataagggttcgatggagaagtccaccaccatcttcaacaaacgcatgacaccatacgactcaaccgccggtgagaaggaggattggccatggcgatatgccaaaacagcctctcaggttaccgactggatgcgccatgagcttgccgtgcatcttacgttgtctcatcttgtcgaagagtcgatcatcgtcgccatcaaccgaaccattccgatggatcatcccctgtaccgtttgttattgcctcactggtacaagaccctctccctcaatgctgctgctcgtgccagtcttgtaccccaggtagtagcggacatcgtcggcgtgactccagaccaagcctacagtttcatccgcgacgcctacgacacatacgatttcgttggcagctatgttcccaacgatctcaaccggcgtggctttcccaacacacaagagggactcaaccacactcgctacaaaaactacccctatgccaagaacatgcttgctctctggcacgttctgagaaactacgtcaactccatgctcagaatctcgttccccacggatgagagcatcgcaaatgacaagtacatccaggactttgttaaagaagtcaaaacagccggcttcatgccctctttcccggagctcaagacgctcgatgcccttgtcgacgctgtcaccatgtgcattcatatcgcctccccttaccacagcgctgtcaactacctgcagaacttctaccaggtctttgttgtctccaagcccccatgcttgtgtaaggagcccccgaccacaattgggggcagctccgccagttcaacgagtcggacttggtggcttcacttcctatcaacagacaacgacagtggcttctggctgcacaactgccttggctgttgagcttcaaggtggatgatgagaggagcttgctcaattatgcggccagccagtggaatgtgtaccggtacaaaaagggggcgaatgagctgaaagttaaggaggcgagccagaggctgtatgaagacttgcagggactgcagagggtcttttttcacaacagcacgggaatggataaggggagtattccgtatatggtattggatccggggttgacggctgtttctattcttatctagtgtcaaactgtgggttgagaggggggatattccgcagactgttgtaggatgttgggttatttatgatgagtgaaaggagctaccaggcacaaataatacgataattatctctcgttcatctcaacctttccatcaatgcagttcaacttaaccccaccaagccacctgaccctgacccacctgaccctccacactttgtttgatccctgcatgagcgataagataagccccatctctctccaagggtccaccaaaaattattcccatcgcaaccttgacggccaccttcaccctccaccctcacaaatcccattcaaccctcccaacagcaaccatgccctccgtcaaaaaccccaacaagccctccaagaacaggctcgccgccaaggccgccaaagcccggaaagaggcgcaaaagtcctccgccgctggccgcctgtccaaaatcgagaagactgacgcaaacagatttggcgcccgcccggggttgatgcctacgagcggcccgagaaagccggtgagcgccaagaagcagaggaagttggagaagaagatggggtatgcgcttaagaggaagatggagagggagggggaggtggagatgaagggtatgtgacctggagatattgggggggtacagggagagggtttgctgactggaatatagatgcggttgtggttgagaaaaaggctgagggtggtgagaaggaggaggttgagatggatatctcatgagtgggctgaaaggggacgattgggggacgaaacattgatgataccctttggtggaatttaccgctgagcgacaaaatcatggaccattgactgtggttgatgggatatgtcttgggacgccaacttaagagagctgcatcgggccttggaattccggtatggggaacttggtgggagatctggaccatgcccgctttcccagggacacgctcacacggggaaccaggtgagaaatgtctttctcattgttggactggaatggtcctggaagacctgttctggcactactaaacagtgcgttggtcatgtttgcgggtttcacaaatgattagataccaacagtgaagcaacgcgtcatggtggtctaaaaagagaatctcgatcgagatcttcgtcattcgcagatcaaagtactcaacatggatttcacgacttgccgtttgttcaatccacctcagacaatcgttaggtcctccttctctgtgaaccatcaggcaggcccatcaaacatactgctgtctgaacctatgttagctcctccgttttcccggcgatcaatgtatgccgtcatgtcatccactgggtatatcaagccaacccgctgccacgccgaatgcgtcgtcaggcgccttggtctcaatacaagagcaatgaccaggaaatttttggggttcagagtggctacaggtatatcatagagcggtccagcatgcaacttgatacgctcgagcaaactcaggcgtacctcatcaccgtctttcatcggcgctacggccagcggaatgccaggccagaacttctgccgttttgaagtggccacgtgctctatcaaccaccgaccgtctgtctgctccgacactcgacctcgactagtccatgagcgcagtttaatatgtccgccggtaactctcccatatgggtctactccttcaggtaccgaggagcattctagcagctcacaggacgtccttcctaggtaacctaggtggctgtcaaagaagcgcctgaccttcaaaggatctcggaatgtaatgggcccctcgatagatgcccagctgaagctgggggcacggtacagtgcaggccgtggcgcaagatgagaagtgccaacccaatacaaggcttctgggatatgggaggaccaaatccccccgcgatacgtgtttgtggagctttccgtcgacatcatagacgtcgatcctgcggatgcaattccagaaagggcgggaagtcggtccatctcgtacgtcattgccagacggctgaagaactcgaatatcatcctccaggcctcgtgaatggtgtcggggtgatcgtcgggttttgccagatctctgaggctactaacgctggtagttgggccttttgacgtgtacgttcccgtcatgagagatatgaaccgcttgcgcatcatctcaaatggatagtcttttggtattgtcctctgacgctggttgaaacctggaagaggattttcctggacctcgaccggcgccgccaggtatgctggcaagccattatcttgttttttggggtcatcttcgaagatgaagacttctgtccagaatgcgcgccgacactcccatgccatctgagttttgccgaagtgaagtacacgagggcttaccaaccgctcctggaacgcccacacccgcgtaagcaatgggtatcctgtcagagtttggtcagagcttgagatgccgtatggcgagatgccgcgaatgtcatctggtggggtcagggcaaaccaacgacgaaacccggcaacctcgacactcaccggcgcccatagcttgtcatccttgacagttcggccggaccagtggtaaggaatctcatgaaagcctgcgaaacagccgcagtcaccatcagcagacccagtagccgccaatgtgaggaaggagttctggtatatgcttgccatcttgctagattcacgttcccagtcgctcttgtcatcctgtatgatgcaaagactatcgatccagaggtagcctactccaagacggcgggttatcatggctgcatctctgaatgtccttggaagccttccaagggaaaagccctgacgccatcctttcacatttttcaacgttgcttcagcctgctgggttgttgtccgaccccagcaatgacttagtgccagataatcgggaagggtgtgacttttggacgacacaatgtctttggcgtcaactaatcgtatcatgtcctcagccacacttagcaaccgaaatggaagcgtgataggggcatctggaaaacagcccgattcatgtagggcacggcattgagaaatccattcaagaatggtcgaagtacaatggtcgacgtggtgttggatttcatcttgtgaacaagctagtgagcagagggcgtaaaaaggtgttgagattgaagtgacctacccggcgaggccaatgagactagacggatagtcgacatggcgacatttttgaaagagaaaaaaaaacatcaaaacttccggcattcttccctcttccgtttctggatatgtcgacccatagttctcttcggacataaagtcaaaaggcttcatgattggacccatacattcgattgagatgttctttgggtcgatgccgccctctgggagatgatacatgtgggagaaatgcaaagcgcccttggctatgacagagcattgatgacatgaggaggccaacaatatcgctacatcgctgtggtagctgtaggttggtcgagggaggaccactgaaggagtccaatcgctgcggcgggggtcttgggtagcaacgatgcatcgccgacatcgagtggtagatctgtctgacgccatggtatggcgtagatgaggactgtaaggtatttgttcagaatgcgtcttggaaagattcacgcgatttgatgtgttgattgcaggcaacactcaggatttgggggtggcagtgcgatcagctgcctcgtcttgattgcagtggcagtcatgatgattccaagaattcatttgtgaaagccacctacccaaggtaagcaacatagaacatcaaatcctctaagcaccacgagatgcaaccgatccttcaaccaaaacaacacctcacaaaaccatttcagagtggccattaagccgctccactgccgctatcatcacaactcaacattaggtatctctcgggcttcccagataaactacccttcatagtatgcccggatttgcactcgacccgtccactctcctcgccaccttctacgctcttcccaacgtcctacttcttaacctccaccacctcctcctcctccaccaccaccaccacctcctcctccttcctcattctgaacactgacctctcctttcttcatatccttgtcgttcccttaacccgatccgaatagactgccgtctagctgtttctcctgtctttctagcacagcctgatcatatctcaatctcacaaatcaccctacacatatcatgattcactaacctcacccagggtctccaagagcaaatagcgtctttctcgcttccccattggctcatcgctctgggtgcggtcgaactcactacacaacctttcatacgcctcctcaaggtccttacgatcacattggcccatcatgacacgacggggcatgttctcgaacctgttctaataaagattttccattgtaaatgctgggtcggttatcagtgttgtgacgtggtggttgttgtttgctccagttgtgttttgcgcaggtgatctgggaaggaagggctgtaaatcgaagatgtagggtagcgaatgggcttcggaacaatatcaacagcgcatcgtctcactcttatagctccctgccacaccatcaggcttccacgacgggttgcagatgtcttctactgacaaccagacggtctctagccgagtcaagggacaacaaaggcgagtatgtgattactagacagttcatcaacatcctttgactcatccacacaaacaagcacatcttgcagaacaagcacctagacagattcatcacaaacaatacgaccaattcttcgtgcttccacgtgtgatagccttcggcacccaggccacaagcagcctttcacaagaaaaagtaccttgccaccagacggcctctcctctacactaccagtgcaactctgtccttccttcaacgctatcagcccatagtcaacactaccgaaaacatcctgcacagcaatatcacatcctagaatcatccatcccaaccttctcacaatcccccgtcgcctttagccaccgcttattcccctcctcccccttcaccctctcgatctccacaacccccctcaacctcccatgttttaaagctcccatcactacccaccctcatcaaccgccctccttctcatccccccttcctcgtgaaacacccccatccccagtagctgtcccatctgaacctcctttcccatctgaaccgcccccatctgtctcccctctccaattctcccccgtagaaacccaccccccgttcttctggtcctctccgactccttctactttctctcccactcagcctccttcgccgccgtaagttccgcgagcgcgtccacgatcctctgcctgctttcggagttggtggtggtggaatcgagtttctctgacattgtgcttgctgatacaaagtaggtggtggtggtcaaaattggggtttagttagggcctgccgactttggatgatgggcgtggttggtataagggatgtcttgacaggggatgaacggagagaacccccacacccttgtattccatcaggcttggtgttgtttgacttgtagcagtgttccttgactgactcgaaaagagtcctgaacaaaatcactcccatgaccagaccagacaaccatgttgcaatcaccgtctttcttgtctattcacaaaccacaaacatatcctacctgaccaacatccgaagaaagaattcgctcaattacatgtcaacaatacaaacccgaaaggtaataacactaaccacacacacacacacaaaagcccaatcttccctcccttttgtccctgtaaaatccatccctttccctgagcgctcaacagcaaaatgacaacaacgccctatttttggcctttcataggacccgtcctacaatgacaccacgacacccaatcccaccaccaacaatcctccctcacaaaagacaaaagagatccctttcatatcctcactcttttcctctcacctctatcctcttccttacaaaagcaccataccagcaccaacgcccatagcaacaaccacatacgccccgacagccaagtcaccaatcgtaaacaggtgcttcatggggataggcacggcaatattcttgctcgtctctgacccaccctgggtattgctagcagcctcgctggcctcagccaggctagccttgcaccggtcatcagcctcggccgcctggatggtggcctgccccttgaactcgcaagcgccgctggcctggttctgggagttatagtactcgttgagaatataccccaacttctgcttatctccgcacatagagaagggtccgtacacgcccgaggtgacattgccgttgatgccgtcgcacgcctcgggagtctggtcgcagacatagttgaagattttgccaaagtcggtggtcttgaggttgtccgaaggaacgcaggtcaaggacttgtacatgcactcgcagaggtcgttgttgggggtagggggcaagcggtcgccgctgacgacccacttggagttgaccgtggggcaggcggcgggggaattggtgggattgtaggcgtccatctgggtgggcgaagggcgaacggatgccatggcggtcgagagagtgtcaaagtccttcaacttggaggcggtgctgcccttgatttggaccagacctaaatgaaaagtcagcacaggcatgtcacaaataaggggtgcgcagaaataccgtagtcattctcctcctggtggtacatgtaaacaatgccgccgctaataacgccagtcattttatcagagtagagggcagtagtctcctcccagatacgaccctcagcaccgtggggaatgttgcagccatattcggcaaagaagacaggcaccgagtaccccttgaagaactcgacctgcttatcatagcccgaatccgtgaaagagctctcgccgcaccacgagtagatgttgtatccccagtaatcgatggcctcgctctggttgccgcagttgaagtacttggcaatgttttcacggatatcggcgtcatcgttggcagcatagccaacgcccaaccagcgcttggtggtggccttgatgtggttcttggtgtcgcggacagcggccttgacgtaggcagaggcatcagtattggtggcattgttggtgacctcgttaccagcgaagaagccgatcacgttgctgtacccgctcagggcgtcgacgacatcagtgtatcgcttgagcaactcgacgtcccacttggggtcgtcgcggttgaccgacaagcttggctcgctaagatcgctgatgacatagatgccggcgtcgtcgagaagcttcatgcactcgtcgtggttcttggttgggtcaatggcataggtacggatggtgttggtacggagttgcttgagaagggggacgtcgcgtctgcagctggcgggatcggcaagagggtcgctgtacttggagctgccggtggactggccggaggcggcgctgtcttgctggtaagcaacacccttcatgaagaattgggtgccattttcgtagaagaatttggacccctatggaggaaatggtcagtgagaagagccattggaggcggcgcaaaggtgaggtgcagactgtcgcgactacacaccttcatgacaatgggaggaagttcggcggccgcctgccctagcagtagggaggcggaaacgagagatgttttagagaatcgcattttggtgatgttctggttgtggttgcgacaagcgcgcagtgtgagcctgttgatggattgtctgttttgatgtggatgtagttgtcgggcggttggaatgacgtctgagacggattgattcacttggcgcacgctgtctctgctggcaaaaaaaatccggaaaagtgaagaagatgttgtgttcaacgaaagtcagaatgaagcagagggggggggccgtaacgagtggcactgaaacaagcaacaagaatgcagttccctctgcgatattaaacaatttgcaactgaaacgatggtaagaaatgtgccagaagttgactggaggaaggaaagagagagaaagattgacggcaacacggaggacgagtcgagggcaggacagtatcaaaaatgggcagcagcggcgggcgggagcaaggcactgggtccaatcatgtcaatttggccccatcccaactccactggcactgacagcgaccgataatagctagcggccgggctgtgttcgggtacacggcgaagatggagggtgggatatcggggtacttggagacagaccagtcaatgcataatcccgacaagtacacagctaccaaacccaatggttccatcataatttcgtttcatcagcttgcgctgtgactgctatccaacggcagggttctccttttgcaggcgcgcagctcgtgtttcccctgtgccgggtgttccgcgtggcaagcaatggctggagagcgatattcacaagagcgtcgtcagaggtttcgcgaaaaaacccttgtttgcagcatctggcgagatcgtcgagggcttttcttggaaatgcttgagaggtcttggaaaatgcttggttggtgaaacaagactttcgccttcatcttggctcctgcttggcggtctgggcaacatcctgggcacggtgctccgctctggccttttgcaacgccttcggttggcagctcatctccggctccatgccatgtgccatgccaccgcaggaaaaaggggagcagaaggccgatggcgcgttggttcgatcgagagtcacagctgcataaaaatctatatgcaaacgaatgggacgatctgaggagattgattcttcgtggggccttcagaggcacagaggccgttcggataaccctttggggtgttctgctcaccaagctgtcttgaacttgatgaaaaccaggttgtcatcgacatgacatcctcctcttttctgtggcttgcagttttctgcgcatcttggcgccgagccggccccgcgctctcagcacttggcagccgcctgggcgttgacgtcctgacatctcccgtttgttgacgtttccgcttggatcccaattgcagcaatatcatgttcaacgctcagtgagcttgtttatttatttgtttggtatcgccaccttcaatctccaccatcggcatcatgttgtccagagacacgagccagggaacagagttgctgtcttcttctactcatcacatcaatagttcctttctggccacgggtaatctgctgccatgaagcccctgtccgcccttccatctctgacatctggcctggccatatccaatccacaacccaccatcaaatcccaccgccacaaccccgacgtatgtccaatgccttgttctgttggtctgccactccctcctccgcttgcccgttcgtttttccttgggttcggtcgtcaagatacctgcacaagaaagacgagatgtcagcttcatgcaattgaagaaaagctcaaagaaagcagacgtgtatcagggtaagccccacagccatcttaatattttctcttcggtttactttgcaacatgtgaaccatgtcttttcccaaatttggcatggttctccggaaagcaagctcggtgcagtttcctttataatcaataagatagccgtgaaacaataagcgcaaagacaaaacgagaaaatgctcttgcctggaagggtgttgtgttgctggtccccatgccgagtgggttgtcttcaggagggaatgtgaaaggaagacgcggaatgggaggctgttaacccggaagtcaaggaaactctgcagatgcaaggagctcaagtcagcaaaacaactcaaaccacccaagaactggatagaggaagtgaaggtaagcaacatcagaacaccgatgcaaaagcgtcatcggtacgccaggttggcgtggccttaatctcttgagaagtatcatcatagaacccgaaggatggagggtgttgagaccggggggtgtcctacctgcttgtggtgtttctagcgtgtgggaagctcgtcgggatctgtcagagacccgaaaggttaacaaagccgtcaagcaaaccagcttgaaggtgcagccagaaaagagggctccatcagagcgacaagtgttgtttcatgatcaccgctgtgtggtgtgatgctcaaatggaatgagtacacgtatatgagtgtgtcatcatgaatgtcggaggcatggcggtgagggaagggggtggtgttctcacctttgaagggagttctgtctcgtaggtagacacgtgggcatcgatctcggcttcatctgctttggcaacagacaccagaggttagtaaagtaatcttctcaaattgtgctgggtgtgcaatcaggagagacagctcagtcaagataaactgtgcttataaatgaacatcatgtgcacgccagtgaaggggtggttgttcagttttctcatcatgagagccttggtgagtgaaggagagaagtgaggacttactcggtcggtttcttgcctggggctcgtctatgtatgctgctcaagatccaccaagttgttagcatggctctcttggggttgggaggggccgggagaagatacttgccttgctgctgaactcacctcaatctactgaagcaccaatgaccaaggtaggtagtcagtgctgaaacaccaaaagttagcaaggctccaaagccaagagtgaaaagaggcgggtgaagatgactctgtcagatctactgcgaatggtaatcatggcatgcccaccagcaacgggcgtgatgctcagagagcgattcgtgtcatcataggagccggggttggatatgtgcttggcagtggtctcggtagtgtcatgacacttacttgttgagggagcacgaggtcaagaggggttggtctgtcaaaacaccagatgtcagcaggatcgtcaaagtcaaacgtcataaaagacgggaagagatagctctgtcagatcaaattccttgtaatcatgttgttaccaccgagaatgggtggtatgttcagtacaacactgtttggtcatcacacgagccggggttgggagtgagccggggttgggagtaagccggggttgggagtgtgccggggttgggagtgtgccgggaggagtgccaggggcatgacacttactcggtgagagagactggtgggagagactggtgggagagaccggtgggagagactgatgggagagactgatgggagagactgatgggagagactgatgggagagactgctgagagaacttaatgtcatgaggatgttcgtctgtccaagaaatacaggttagcaagatctccgtcaagaatagctgggggggggaaagagaaaggcgttcagtcagatgaaaactatatattttgggagtccatcctctccacaccaatgctgggggtgagttgacaaagtttttatcatcatggtcactgtgaaatgatcacaacgagaaagaagtcaacgcattcgctgctcacatttttggtatgatgatgtggatgggaggttgggatgtttgggtgcctggcatgttgcaaattagctctgtaccaaagccaggaaggtcaagaacaatgaagaggaagtgtagttgactgtgtcagagagaaacgaatagaagtgtcaatcatatgggttggaaccacccagagctctcagtgttcaatgtgttttaatcatcatggtgttggtgtcaaatgatgctgcgaaggaagacttaccggcttctggccatgatagccgtagtgtctgaactccgagtatctgtgatgttccatggccggctgtgtcatcgagtagatgtgatcaggtaaagaggctatgatgtcaagagatcattcagatgaaaaaagtacgactcgtcgagaacatcatggtgtgatggtcagaacaaaatgtcatcattcaagctggggtgttgaggggcattgaaaccaagggagtggatcctacttcttgctgtgatcgtcatcatcgtcgtcttcggctatgtttggaccacggcagtcagctctctgaccaaaggaatcatgtcaacaggaataaggggggggcgacctcctcagagcaagcaagtagaaatcaactcatgcccgtgtcggggcagtgatcatgaagcgagtgttgtcatcatgatggccgctagaagtgtgtaggtgagaatagtgaagtgagatactgacctgatgagcatggcagcagggttggaaatccagagctatcatttccttgttgattcggaggcatcgctggcatcaggtggaggctcgaagtgtagaggcgtggtaccctagggtttgtctcgaatctgaatagaaatatgtcagcgtatgaacccaacagcaaacgagctacgatagacattgtagaaggaagagggctgtcagattgtttgttgatctcaggtggcctcaaagaaggtatgagacccattgaatacagagaagataagtaaactcatcatgaagctgtggaatagagacaaatctcggactgggatcacttgcctgctcgggtttgtcttgcctcttcatgtgccaaatgaccatgaccgacatcgtcgggaattgacctgtgcttcgatctgcttgggaagggaagcagtgagtcgtgaccgaaacagtacttgtcagtaatccacgcgaggtgaggatggtgtcgactgtctccctggagggagtcgaaggatcatgtggttggaaaacaattggtagactgtcacgagaaaaagttagcaggtcagatatctcaagaatcaatggctaatagaagaggagtgacgaaaggcttgtcagatcatgcttgtgtgcttcaaagtcgggagactcagtcccaaatcccatttcggtcatcatgttggctgcaatgtcttgtagtgctgcgataggttttctcttgacataccgactaaggacatgggaataatgccatcgaggcatatgggaaaacttatgatgatcagatcgagtcctgatcaatgtgacgatgatcagcccatgggtctattggaaaggcaaagagaagatggatagacataccaatggcgatgatgattaggcgagtacctaagacgatggagttgctcagagcgatccaaattggttgctcgagtaccgtagtcctggtctgacgaaataagaaagaagttgcccacgcctacaaggtcaaagaagatgatggggtggacaagcgaggggtcaagaaatggggagccagaggcatgggccggggggtctcggcgaggggacaagctgccgcatccttccggctttacaagaaatctcgatgcgggttctcttcaaatagaagacagcggaaagcaacagagaatatgctgatacataggccttctcccaatgtggaagacgagttttacggccatctacaaggagaaaatcagtaggaatgaaaggggatagggagtcgacgatcacgaagggcatgaaaaagtatcattgaacatagaaatgcctgatatgcggatcatactgaaatagggatctcagagccattgagtgacatcttacgtagagttacgaaccgaaataccaaggattgattaccttatggaaaacgaacagattgatcgcgtccagcaccactagtttgcagcagtttcaccggaattgtcaacacaggtatgtcgaaagaccccagctccaataacctaggatagcgctcagattcatgcagagagaatccggtgttagcgagggcattcccttcaaatacccaggcggctttgccatttgcgaacagcccgaaaaagaggacggcactgtggcagttgttatgctgttgatagaaaaactaaatccacacgccctcctatcaggaaatataaatgctgttcagataaggctagttaactagatcactcatacattaaggacttgggcctacgatgcgtgccaaaggggggtagcccagttgcaacttgtgaagacccgctttggtgggcattgaagctgcgttcgatcatttcagacacattaaaaacaacgttaaacgactatcgcagcacatagccccagatcaaattacatgcccgtacagttgcaaccatacgcagccaaccaagccccttttttggcgctcgggccatgtgaagtaaacaaaggagcactcaggggctacggcatgctcgggtttgtctacagctcccagttctaaaaatcggcatatgccgagaaagtgaagccaaaagtaagtctcagtgataatgtagccgcgtttgcatttcttttctctttgttagtgcaccatctcatccctctcaacagtcaggttccatttctgctctggttagttcaaatcgaatggtacgtttatgtctgcactttatgtaatttgagtattcaacagcctcatgtgaaggccgttgaaaccggcagagcgggggctgatgctttgaagcttggtacttgcattgggggcttccaacattatcaatctctctccttcagcttcatcccatgtggtgatggccgcagttggacatgagatgacatctgcctgcagctggctgacaactgaagaggctatgtatgcaccatgactaaactggatccttggccgcctctgtgtgacgtcaattgccaacaggttgtgaagaaaggggcaaaaagagcagtgacctgactcgaagggtaaagtcaactagtatatagtgaactggtagcagtggcagtataagaatgggatacaaagactctggaggcggcaggtgtcggtcaaaaatatcaatgacagggcctttttgtgtcgctgacaacaattgacggcaacttctgattgtgcccattggttggtggtctgtgccacatcacagtttgttgccttggcgcctgaacaactaagccaagcgacgagcggtcaggttgttatcggttatcagaatttttttgaaaatctaagccccaccaaagaagtgcggcttcccctcccccaccttcccactgattcaaacctaccacagggcaaaggcgcagcaaaccaaccctgaactaaactctcttgttgcctcctggtactagttggcttgcctgcgaaggaacaaaggacgtcgcatattttttttctgcccgttctttcgttttggatttttgatccatcaaacccatctatcttccagcatccacagcacaacatggctccctcgtcgtccaaggaaaagcgtctggcgaagcgtgccgctgagggcaaggagaagaagactgttgcctcgcgctccaaggccaactcaaagactgccagcgctgccgcttccgtcaacggcgatgagcctgaactcgacgcccatggaaaccccatcgtgtcggacgagccagccacctcggccgacaagatggacgaagtaaagcgccttgccgaccagatggacaagcatggtctttccgaccgtgtcaccaccggtgttctggcctctaccgccgccagcaaggacgtcaagatcaccagtaccagtttggtgttccatggccgtgtgctcattcaggatggcactctggaattgaccatgggccgccggtacggtctgttgggtgagaacggttgcggcaaaagtaccctcctcaaggctatcgctgctcgcgagtatcccattccagaacacgttgatatctaccttctgaacgagggcgctcccccatcagagctgggtgctttggagtgggtcgtcaaggaggccgagaacgagatggaccgtctcgataagttggccgagaagctcctcgaggaggagggccccgagtctcctgtcctgatggatctttatgaggtacgaacacctccctcaccgcgcctctcggctatacataagctaacctcattgatagcacatggacaagatggatccctccaccttcgctacccgcgctgccctcattcttaccggtctgggcttcaacaaggtcaccatccacaagaagaccaaggacatgtccggtgggtggaggatgcgtgtcgcccttggcaaggctcttttcgtgagaccgtcccttctccttctcgacgaccccacggcccatttggatctcgaggcctgcgtgtggctggaggaatacctcaagaagtgggaccgcactcttgtcttggtttcccactccatggatttcctcaacggtgtgtgcacaaccatgatcgacatgagggataagaagctgctctactatggcggtaactacgactcgtacatcaagacccgctccgaacaggagaccaaccaggcgaaggcataccagaagcagcaagacgaaatcgcacacatcaagaagttcattgccagcgctggtacctacgccaacttggtcagacaagcaaagtctcgtcaaaagatcttggacaagatggaggccgatggtttcatccagcccgtccaccaggacagagtcttcaccttccgtttcgccgatgtcgagaagctgcctcccccagttctgtctttcgacgatgtcagcttctcctactcgggcgatgccaaggatgatttgtacaagcacatcgacctcggtttcgacatggactcccgtactgccttggtcgggcccaacggtgttggcaagtctactcttctccggctgatgactggcaagctttctcctagagaaggtgtggtgtcgcgtcacactcacttgaagctgggtctgtactcgcagcactcggcggagcagcttgatctcacaaagtctgctttggactttgtgcgtgacaagtactcggatagatcccaagactaccagtactggagacaacagctgggcaagtatggtctttcgggcgagtctcagacttctctgatcggtaccctgtctgacggacaacggtcccgtatcgtgttcgctctgttggccattgaaagccccaacatgttgttgctggacgagcctaccaacggtcttgatattcccactattgacagtttggcggatgccatcaacgcttacagcggaggtgtcattgtcgtcagtcacgatttcaggtgcgtcgaaactctgatggctaatttgtaggatttaattgctgacatgtctccagactactcgacaagattgccaagcagattctcgtgtgcgagaacaagaccattaaacaatgggatggttcgatcggcgactacaagaactatcttcgcaagaagatggtggcttcgggcgctgtctgagttggctagattttgtttttgcctctttttacatgagaatgacatgggcgaggttgcgctgcagctgagacggcctcaggtaagcctcttctcacaccaatcacgcggctgccagaggggaattctggagtatatgggatgggagttgaccgggaaagtgtcaactctcctgcaagcataaacggtggtggctgggttgggttggtttgatgacagcgatgaggtttctttctgggccggatagacttttgttttcacgtttcgcgattctccagccgttcattagatgcattcgcgctcagatagcgagtaatgacggaaaagttatgatcgattcggttcgtcaggtagttgtgtgtgtcagttttcatatatgtgtgattggtgaagtggtgggtgtccgggacaatatgagggcattcgcaacatgatgtctgagggctgtgccgaggcggtgggttgaagatgatcactgagaaggaaacaattgattgtagttttgggcatcaacaggcggatcttgggatgccggttcggattcttttggtgtctggtgagacttttcccactgccgctgtggtgtgtgttgcatggctggggcaactgcagcagcggcaggcggatacctcgcgccggggctgaaatgggtacttccttgccagcacccctgactgggcatgggggagggggtggctgtagcgttgttatctgataaaagggggctggctgttggacctacactaacatggaagggggtgtcagattagtggagccctgctgacgtctttcagcgcgtgggaccagcttgtctcgatctggctggacgcctggggggcctgtttttccggggggacgggggggactactgatggatggatcaccttcgcgagagctgcgaggaagcgggttgtcaaaggggattttgggggggagaagactctgctgcacacaccaacgcagcaaaagcccagatgtggccaaatcgagaatgagcaatcgggtctggcaacaccgctgctggctcatggatccattcatctccaacccaacaccattccttccccttcgtccattcccattcccatcaccatcaccaccgccatcataaccaccatcgtcctccaccatcgtcctccaccacatcatacccttgtcgctgtcgccgtccagctgccatcggcgcccagctttttgttgattgccctgtatttttctcccctttggtgattgcttccacccatcaccctctttttctcaccaaccccgagcccacccggtgttccatccgatctcgttgcgataccctcatcatccacgcgcccgcatccgcgccaacactgccgctgacctcctgttccccccctagcgatctcggagccgtctttctagagcagattgtcagaagccagaagtgtgcaggtcacccttttctttagtttaaacagacttgccgatagcttcgtaattcctcgacgggacgcgtgctaggtgggcaaaaagtgtcgatgaatgcacatgaattgtaaaaactacacagtaacagaagcaccatggacgggcgggaccacttctcgaccgtgctgcaacggccgcctcactttgacgaggactgcagtaatggcaatggcggcggcagtgcaaacgaagatcgcggaccgcgtggagggctgcgcgacatcttgaatccagtgagctctgcctcgcagccagcgtcagctcttgggccgccaggaacccccggagcacccgcgcctccacggccgcactcgtccttcagtctaagatcaccaacacaaggtgactttcacaccccgaacccctactctacctcgcctggcagccatccctcgggctctcgttccatcctcagcaatcccgtggcaggagcctcgatttcggcagcctccttcccaccaccaccaccgccgcctccaccactgtcggcatcgctgcaggcaccgccggccattgcatcgccattgacgacacaacaacacccgtcgcccgtatcgccgctgcacgcgccgcacgtgtactactcgtccgagattcgagatcgtgatcgagacagaggcagagacagagacaatcgcgacccggttctcgaaaagtcggcgggcagcagcttctacgacccgacggcggattcaacaaagaaagagcgcgagcgcagggtttcggacacgggctcctcctcctggcgcaacgcgacgcagagctcgacaccaaaggtaagtaagctttgggccccctccccaaaataccaaaaccattccattcctagacacggccaagcatcatcgaagagcaaagtgcaatttgcccgccctgttgcctttttgctctccctaatattatatcatcgcgtctcccccccaatcgctgcatcaacacttgacaatttttcccgccctggccggcgactccctcttcacctcagcattcaccacccaaccaagccctatcagcccgcgcctgcttgattgacgtcgactaatttttttacaccacgccactccaggctcgcgactcgtacaattattcccaatcatccgactattacaccgcgaacaacatcgccacatcctccgccagcaaccaccagggcggcatcatcaacggcgccagctacgcatcccatgcgacttcatccctctcacgaagtcccgtctctcagtaccatcctgctcccactgcaggatccatcagtccatcagcacctgcatcggctcgacttggtgccatttcatcgcccagtctgaggcacagccagatgcccccttccaccatcaacgggaccactccaactgcgttgcctgtcctcgcacggagcgggtccccaaccccatcatcatctaagggccagggcgtctcaggtgtaggttgggaccgtttgctccatcaaataagattcagcctcaggctaacaatttacccaccgccaatacagactccaagtcgtgccgcaggtgtcatgtccttttccaacatcctctccgaacctgtctcgcgacccagagcgacctcgccatctacaaccgacgatacccccatccgagtggaaagagccggaaccgtcgacaaggctgaccgcgagaaaaagccaagaaagaccatcaagtcgcgtgtttccgaaatgaagggtgtcgagtcgacgcccaaggcgtccagaaagaccgcctccaaacccgagaccccggcttccggtccacgacttccagcgaaacgatcggccaacgggcttacgaagcaaaagtccttctctgccgacaaagaaaggaagattcaagaggaaatgcagcagctcgactcttgggacccaccagaacacaaatgggaagatgaatttgaagagtatcaacgacggagcaagcgccgccgactggagctggcccagttggacctcagccacaagcaggcgcgcagagatgacttggcccagtcacaaggtttcaagctcaagttgcatgccgatcttgggaaacggcgattcgatgaccttcactacgacgaagcattgcaagaggtgcgacagcgagaagtccagttggagaaggagcggaagaaggacatgcagcgaaagaggcgtcgggagaagtccatggctcttaccctcgagctcaagaattctgctctcaagcgggccaccattgcccagagcgaggcagagcgcctgcggtacatgaaggaagcggaacgagccgagaagaaagttcagcagaccaaatacatcttgcagaatggcctcaaaggtcctccccgcagttcgagcgctctcgagcccaatctcgagggcggtaccatggcgactttccaggccgaaaacatggaacctggcaaggccaagggcaagggtcgcgccggtggtcgactcaagaagtccaaggagcagaagcaggcagagaaggacagtgccgaagctgcccaggccgctctcgatgccgggaaggagcttcccaccaaggaggagacgagcaagattcgactcaagatcaccaaacagcccgccaccgattccgagaaggacaaggaaaccaaggagcccaaggactccaagaaggaaaaggtggtcgaggagccaaaggatctgttggagatgcggttccagtccaagggctttaaccagatctacgaccagatctggcgtgaccttgcccggaaggatgtcaacaaggtctacaggctcgccaccgactcatattccaccaaggcatccaacctcaagaagaccgccattttggcgtccaaggaagcaaagcgatggcagctccgcaccaacaagggtaccaaagaccttcaagctcgtgccaagcgtgtcatgagagacatgatgggcttctggaaacggaacgaacgcgaggagcgcgacctccgcaaggccgccgagaaacaggagctcgagaacgcgaagaaggaggaagccgaccgtgaagcggctcgtcaaaagaggaagctcaacttcctgatctcgcagaccgaaatctactctcacttcattggcaagaagatcaagacaaacgaggtggagcgcagcacggaccgacccgagattgctgatgcggaccaaaaccaaatccccgaaacgtctcttgatatcgaggagcctactggtccggttggctccaaggttaccaactttgaaaatcttgatttcgacgaggccgatgaatcgaccctcaaggctgcggccatggccaatgcgcagaacgccattgaggaagcgcaaaagaaggcgcgggacttcaacaaggacgccaacctggacgaggatggagagatgaacttccagaaccccactggtatgggcgatgtggagattgaccagccgaagctgctcaactgccagctgaaggaatatcagctcaagggtctcaattggctcgtcaatctgtacgagcaaggcatcaacggcatcctcgccgacgaaatgggtctgggcaagactgtacagtccatctctgtcatggcctacctcgccgagaagtacgacatttggggtccgttccttgtcgttgcgccggcttctaccctgcacaactggcaacaggaaatcaccaagttcgtcccagagttcaaggtgctgccatattggggcaccgctgccgaccgcaaggtgctccgaaagttctgggaccgaaagcacaccacctacaagaaggacgctgctttccacgtcatgatcacgtcgtaccagcttgtcgtgtccgatgtcgcctatttccaaaagatgaagtggcagtatatgatcctcgacgaggcccaagccatcaagagctcttcgagctcccgttggaagtgcttgctgagtttccactgccgcaaccgacttctgttgaccggtactcctattcagaacaacatgcaggaactttgggccctcttgcatttcatcatgccgtccttgtttgactcccacgacgagttcagcgaatggttctcaaaggacatcgaatcgcatgcgcagagcaacaccaagctcaaccaggaccagctgaagcgtttgcacatgattctcaagccattcatgcttcgtcgtgtcaagaagcatgtccaaaaggaattgggcgacaagattgaactcgacgtcttttgcgatctgacctaccgccagcgtgccttgtattcgagccttcgcaaccagatcagcattcttgacctcattgagaaggcgaccatgggcgacgacgattcttctagtttgatgaatctcgtcatgcagttccgaaaggtctgcaaccatcccgatcttttcgagagggccgataccaagtcgccattctcttgcggctactttgccgagacggcctcttttgtcagagagggcacaaacgtatcagttggttactctgttcgcagtttgatcgactacgacttgccccgcttggtgtggcaagagggcgggcgcctggacaagcccgggcctgataacgcggttgctggtttccggagaaagtacactggcgagctgttgaacatttggacaccggagaacattcgtgatagcgtctcgaatgccgatcacttttcatggctgcgatttgcggacgctagcccgcaagaagcctaccaggctagtcatcgaggactgttcgagcgagctgtgacgctttcaacatcgaagaaccgactcgggaacatgaacgtcctctatcgcgatacggaagacgagaactggactccgatccatgctctgttccagattcagcaacgtactgaccgcaagcctcttgctgatatcactgagcaaggtgtccttcgcgacctcatgaatgtggcgcgcgctaactacgctgatatcggactgggacgacttgagcaagccggccggccccgcgcatctgcaccgcccatcgaggtttcatgcaccggccgcggctcggttgcggagcgtgagaacatcctcttcaaccctcaggtacgcaaggcattgtacggacccacccccgtcgaagagaaggcgctcgtcaccgaaaagatcccaatcgagcgatacccgcctcctgcactcctgccggcgccagataaggagaagacccggtttaccaacattgcggtcccctcgatgcgccgcttcattacggattcgggcaagcttgccaagctcgacgagctcctgcggcagctgaaggagggcggtcatcgtgtgctgctgtacttccagatgacgcgcatgatcgatctgatggaagagtatttgacctactgcaactacaggtactgccgcctcgatggttcaaccaagctggaagacagaagagataccgtgtcggacttccaaacccggcccgagatcttcatcttcttgctctctacccgtgctggtggtcttggtatcaatctaaccacggctgatactgtcatcttctacgactctgactggaacccgaccattgattctacaggccatggatcgtgctcatcgtcttggtcagacgaagcaggtcaccgtctatcgtctcatcacgcgcggcaccatcgaggagcgcatccgcaagcgtgccatgcagaaggaagaggtgcagcgcgtcgtcatcacgggcggctcgtcggcgggtggcgccggtgtcgacttctctggacgtagggcgcccgagaaccggaaccgcgacattgccatgtggcttgcggatgatgaacaggccgagatgattgaacgccgcgagaaggaattgctcgagagcggggagtacgacaagattcagaagaagcgtggtggcaagcggaagcgggcggatgctccaaccagcctggatgagatgtatcacgaaggtgagtccatgttcttttttgccgtttctacaggctcatgaactgaccaatatctactctacaggcgagggccattttgatgacaacaagggttccggcacagccacaccaaacgccgccggagccgacgccgccgatgtccgccctggaaaacgcaccaagcgtgctcccaccggcaagaaagccaagacaacaaagcaacggttggcgattgctgacggcgagatcgatatttgatcacctactctttcacctgcaggacaatatggtagcaataagcctgtaccaatacccagccgccgtctaccaccccgccggtatagattttcttcttttctttttcttcttttgcacacagcatacgtggttgttcggtgtatgtagcccagttcattaaagagcaccggtagacacaaaaacgggaatggtacttgaggctggggagaggagttcaggtcagctcaaggggcagcaagcggataacaaatgaggaatgggtggaagggtcaactaaagatgttcttgttgtatttctgtagaataattacttttgtttcatgttgtgtcttgttcttgtggatgtcgctgtggtggttttgtgtaggatgagaggttgtgcctgatgaagggaattgtgtgtgggcaatggaacaaaagtggagagatgggggagttggggatttagtttatcggcttgttggggtggtagatggtgagaggtggtcatatttgagaagagagacttcaagacaacgatgaagatgaagttgatatttccgatctttttccctctatgctgtgactatgactcccaccctctaccgtttgtcttgacatctatcagccctcggcaccgttcctcctctagcaccccattcagtcagtccatgacccggtaatctctcggatccaaaccccggccttttccgctacggtctcgctgtgatctggttttatccctctgtcagcgtacgcaccccccccccccctcttcttccccatccgttttcgcaacttacgtatacaaaaagcatgcggcactccctcttcacaaatcgttgccttcgttctcccgttctggtccttttccctccgctcaatgaacgcgtccctcacctcgtcggcgacccagtggtctttttttgcaaaatagaaataaaatttctctccgttgtgctctgtgtcgtcggccaagtgccaaaggtcggaagaccacttctcttcggtgatggtggacatctcgtctttgcccatgtggatcgcctgccatatcccgtcttggctctgcaggaagctgagggtggtggataaagcgtgggggggctgtttcattattttggagaggatgagggaaacaatgggggtggggagacagttgatgatggatttggcaaggatgtgggtgtaggagttcaagaggggttgggaggcgatgaaggagagtttttggccggagggggagcgggcgatgtgggttagggttgggaagaggaggatcgccgaagtcaggttgaggagggcggataagggggtgaggtggtggcggtggaagatttcggttgctatgtaggctcctactgagtggcctattaggatgcaggaggtgaagggggtgggggtgttgagggaaacaagggtggaggttaaggagataatttggtcttcgagggtgaagggttgggttgggaggttggatggggggagggtgtttccaaaggggggggagtggtcgtggtcggagaagccgaggaggttgcgggtgtagatgtggtaggcggccttgttggacgactcaagcgtgtcgaggaggtggcggaggtgggtgaggaagggcgtgtagtagcttgctaggcctgggttgccggttatgaagaaaaccaagcattgtttccgggaggggttgttccggtttggggaggggaattccaggtagggaattgcatcttcttttattgttgtggtggttgacatggtgggtgatggttgttgtgtgttgtgcttttcggggttggggttggtgatgacgatgttgatgtggtgctggtgttctgccgaggttttgttggtgggggtaggtgagtgggggtcaacagccctttagtttgtgaaaccctaacccgagcttgttaaagtgcactacggagtacaacatcaagaacgccggacattctgttgaaagccacctgttgaatgtgtattgctgaatttaaagaattaaaagcgctagctatgtacaggaagaagatgccacggaccctgcccggctctgggcacactggttcaaccagactggtggaaccctcacccttggcttgggatacccatgatacatgtcgatatgcctcagtagtccgtagtcttatatcctgaaagtctatcatgtcccagtccagcacaacctttctcctaaataccatccttttcccatgccatttttgacttttccatatcttcttgtgctcacaggatgcgattgcattcctcctgagtcttcaagtggcagtaagggctgaaggtctggttgctgttgggcatctggggaggggagaagaaaggaggccaaaaatagttgggaggaagtatgtcattgatagcctgtctggctgccacggtagttggtgtgacagacttgacgagagtggcgagggtcttttcgatgatttcgacagcctgtggaatatcagaacctgttggtgtaagagtggaaatgggatttccttaccagctcttcgtcaatcttcacctgctgagtaacagcagcctgaggtagtgcattgtgaacaatgagtgggaccggagcctagtgtaacggttagtgatgaattgtggatgaaacatggtttagcgcctgaaataaggacttactgcggctggagcaggcttggggatagcagcaccaaagacagcagcagactggctgaggagagcgacggttgggatgagggagtgcatggccggtggtgatgtgcttttgaggcgatcttgcggcggtgatagagtcttggagagagacttgagtagtgttctttgttgatgtgagatgactgaagagactgtttgatgccgatgctaatcgtcttggatttggggcatggattcatgatcttttgtaggcattgccaccccatcaagtcggtacagtccccgtagggctgaccacgatacagggctgccatgactcagctcaggtgtccagagcccgctgggtcttcaccgacaccggctaacggtcagctagacgttagacccatagccatgggttgagcaagcaagtgaaagcaaacggcgtcttgttttcttgctctagtgccggtcgatcgtcgatctggcttacctctgaaacgttcttgcttgcataatcagtctaaaaccgatcgaaagctttcattgtgtcaatacagctgggaaaaagtaccataacttgaatggtgctattggcaggtggcctgtcgatgtgagttggttgtcaagatattttcgagagcaaattctgtcaaattaagtacctatttttattcatctatctcaatacaatcatttccagccggcgtcttctgctctcccttcaccgggtattctaggggcagcatttgcagccgcccccttccggctttctcacccttgatattgcgtgtggacgcgcgttgtcgtctcacatccgatctctggtttcagcgcgcgggggcgcttccacgcgacctcggaggcgtccacacccaagctcatccacgagctgtcccaatccgcctgcccgcgttcagtcctcggcccaaaaggaacttccacgctcgcaagcctgtccctccaagctctttcggaacgctttggaaacactgtcctccacaaattacaaacccatccccagagtcgcctgatgcccgagccgctgtgggtttggggttcaccctcgataaacaccatatttccgaaagctcttccatgtggtgtgcgaagagagcttgccatgaatccaaatgtttccagccctgtgtcttgagtgggtggtttctgaccagagaagacaatggatttccgagtgagagagtacaggagtacgtctagtaatcctgctgaagccagcaaagagcctgccacgctgtagaagaggaccggggcctcatgtttgaccatggatccgattctagctgtagcgattggcacggtacagagaaggtagattaacgggtatgccagaaagctgcttatctcgcgaagcttctgctcttgtgtggcatactgggtaccgggcgatgtttgttggcagcttgaagcgatgggcttgcggtgagtcaagagataaatgacgatggcgagatatatcacgcttgtggccacaagacagataaagatccataggtaatggaggtacaaacgaagctcttgataattggaggtgatccagcactgatttggcgttagcagcatgaagtgccagaaaagaaggcgaagccacatacccattcgcccgcccggccatagaaatctgacgaaccaccagatatcgcaatgcccaagagagccattccgtatacagacgaccagagtgccgcgaggactgggtagaagacgcgagagggcggtcggaaattcctgacgatactaaggtagccgtgagccgcaattgccgtcacaaagacgcttgaagcgagattcccagttgacaggaaccaggcctgtgctttgcaaactaggtgtctgtcgtaaattccatccaatgctagccatcgagcactcatgaagtaggccgtggcctgcatgagatctgcaaaaagaaggttgtagatgagaacgagaaactgattcggggggttggctctgatccgattccagaagccagtttgcggtcgtgatggcatcccattatcggcttcagtgggctgtgattccgccgaaacagtaaaattccgcgacatcgccagcatctcgtgcaagttgtcctcatcaacctggagatttgaagctggtaggcttgaagcctcttgcgagggttgcctgatatgccacttgacgaatctccagctgaggtacaccaaaagggcgaaaacgaaaatgaagctcaggaaagctagagttgcaacagcatgcaggccgtgtcgaacggcggccggcaggggtgcgagggtgtaggcctcatcttcgctgagcttgagataatccattgtagcgatctagctttcgagctggaggaggtgtctatattttttggtaagaggcaagttgctgtgtgagaacgagaactgaggagaaatgcattggagtggtcaaaatgttgatgaacttggtgtgttgccaaaacaatgagtggcaggcgatctgtgggtaactctgccaaccgattggaaaagaacaggtcaaagtgatgtctgagaacagattccggggtgatctcacttctgaaagggggaagtgagtacaataggcctggaacgaatattcagggttacgagagaataatacggggttgtcgagaaccgcgacgtgaagcagggcactgacgtcgaactccgctctttggccttgtaaaccagttcagatgacccgccagactgagtaactaggtacctaagacatgacccggaagcaggcttcttaaaactccatggaacctatttaatgagatggtctaccttatgtctgccaacgatcaaatggtgacatggttccagtctcctgtaagactacctgacgtctgtgaagcctaaggtgcctacctaagcgctcaaaaggtcacactctttcgaaaacaagatagcgaaattagaaacatttcagttttacttgtaaccagtgttggttagaagggggttgaccatgagactttattgatgagtgttgaggtacccaaataaaaatagtgaattttggcgtgtacaagaggactgaaatttccaagtcctctcgcacttgctcaatctgacctttgtcagtagccattactcctggcacttatgcatacagtttcatgttccgagacggttatgaagcttctggtggcatgttatgctattagttcgattgtcatctaactttggactgttctcctcggctaccttgatgaatatgaaatctgaggagtcgatattttcggtacaaaaatccctaaaccgaaacattcatgaacatcttctctgaaccatgcattatcaacgcccttataatttatatgcactcgagtatagattttcttggagtgaactgacacagtattcttgatgacaaaagttgtatgaaggcagaaagcatgactaccttagacgtcatgtcgttgcgtggtagccagttgctcttaagccatcattgatctcggatcccctaatagcgagtgtcgctctacttgtccaagataaaacaaacaaacaccaccctggaaagagtatgaaggttttgatcgtccgagcttttcacatcagctttttgttttgattgcttggaatacagagcaacacaagagtgcttttatcgtatggagcaagaaacagcaaagggctcgcatactaagccagatcggaaacgtgatgcttccttaaagagccgccgctttaaaccaagacagagcgatgacttcatgaccaggaatctccagcatggtgtcgattttgagttccgccaccctccacaacctccgccagctcgagcttgaatgttgccgccccctctccccagtatccacacaccttcggcatccatccatcgtcgtactgaacgaataatgtgcacatactacatgaacacccgctggctgtgccacaaaaccaaaggctgcaaagctgaaggacgaccctgcaggatcaaaccatcgttccacaaacccccacaacagcgcatctgctgcaactatgtcgaccgcttcagtggcatctgttacggagtaacttgtcaaggtggcgggaggaagcccaaccacttcatcgacagcgaaacagtcttctacaagggcctcgaatgtccctggcatcctcacaagaagatgctgtcactggagaggctgtgggaagaggagtggactgagcagataatcaaggcgcacttgaccaagagataccgcgaggctgccgagcgacgaaagcacgatgagacggccaatagagcgaggctgattcaggaattgttcgaggacgtaaaaaaaggaagatctgttgtcctgttttacaagagcgtgatgaaatggcaaaccatagcaattgaaagatgccgcaaggagctggtaaaattcagtgggtgtaatgccgatctggctttggctgatgatgttgtggtcagccggcagaggcgggtctttcgtcggtatctaaaaccatagcccgagtacgccaggggcttctgttgagacaagctggcatttactcctttctggtcttcgactgatcgaaggactaggcttgcggggtgacctcgctcccagtcttcgcactctctcgtactgcctcgattattcgcagaacctgcgccgcctgtgacgcaggcacaggtacaccttcctcctttccgcttgcaacagccttcgcaaacaggtgatagaacctgacatatgtctccggctctacagtagggcaaacctggtcttccaccttcccgtcaccgccgacgatacacaacctcccgaatctgtcctccgattccttgccgaagtcggtgtcagtcgccttgccaccggctcggagatgatcctcctgaggatccaacccgctcttgtgataactgcctttggtaccccggacccagaaccgcatctgtctggtctcgacacaggcgacgccggcacgaacaaagaccaacagccccttgttcttatagctcaggatagcagtcacactatccggctcctgctcatcggtcccatccccagtgacaagcctcccttctctctggttgacgaatctccctgtcacgccatcaggcataccaaacaacacaaacacctgatccaacaagtgggagccaagatcatacaacacccctcccgcctcgtccatcttgagccccgccttccacgtcgaacccttcgccagagccgtcaatcgcaatctgtcaaagtgcgtctcgaactcgacaattcttcccagcttgtcctccttgaggagattctgaacagtaaggaagtccgaatcccatcgccggttctgatagacgcaaagcacccgctgttgctgtctcgccaaagcagtcaactcatccgcctcgcttgaggtgggaacaaacggcttctcgacaaggacatgcttgttgttgagcagtgctgagcgggtcagggggtagtgggtgtttggtggggtgcagaggaccaccacgtcgacgtctgggtcggcgatgagatcctcgggagcggtgtagtgcttgaggtcagggtagtcttctggggcggagttgcctggcttgggagtgcgctggacgatagagtgaagcttgagggagggggtgagttggatgaaagggatgtggaagactttggcggagaggctggagggggtggttagccgctgggttagggttgggtatggagattaggagaagagacgaacccatagccgacgatgccaacgttgaattgcttttcggtcattgtgagattagtgtttaatactgatggaaagtttggttctttcggaatacctttcagatgggatttctttcagaattaaaggcccctttttgagcattgaagtcgtcgttgtctgcggggtagctgtggtgctgagtcaagaatccacccccgcggtggactcgtatcaagaccccaccacccgggatgacgtcgagctcatggagagaacaccatctcaagatgtcgaccagtttcggcagttttttctttatatcttgatgaaaaagccagatctttttattgtcattacatattttgttcaacacaacattctagcctctcggcttcatgccattacggtatgaagtgtcgtcaaaagaaggcggaactagccgcccccccttgcaccttaacggaccgactctgctatccccatggggctccacgcactcgatgacacatcaaatgatggaactgttaatatccgggactttgattgtggaggtcgttcagtcgagtggaaagccgaacaagccctcagctcgcgagccaggataagaaaggaggctgctccttgtctccgcgaagaacaacttattttaccttgcatcatatgtttggtgaaggtctataggtacttcttacatggctaggctgacactttgcagtgagctgaccttttgaaatccggaatgatgatatttgaaatctgggatggagaaggtttgtattagaacatcccagcaagttgtggactttagcttgccagctgggtatctaactaggtctcagcttcccttcccaacccgagcgttctacctcatgctacgttggtattcctctgtcgacttccatgccaacttagtatcccatcatgacgggagggcactcggcatccaggaaagccgcggcaatctccttgaagtcatcactctcataagtacccagttcaagaggattatcctcatatattttgtcgtcaaagatcacgcaaagattccttcgaaactgagtcttggctttacgccattccaaaaagccagcatccccagggaggaggcgaagggcctttcggcattcccactcggcgacggctttacagcgcatcggaccggctgggaacagaaactgaatggcgctcagcttcgttcgctcacgaagaagatcgtccgagcttctgggtgaatcgcgcgctgaagcgagtattttgcgaacggccaccaggaagccagtgagaaggtcctagataagtacaacagaacagccattagcggggtgatagggactgaaggtattaagaattgacatactttgacaattggaccgcacttgagacgaaagttagagtgtcggaacttgtatgaatcgcaatagtgggcaaatttgacaagtgcgtgaaggtccaaagcgtctccacgcatgacaagagggatctgtgagcaaaggatgagttagcgatgacataacacagttgtatttcgctttgaagtagtggaagcatacctggtaggcagcgatgttgtgactgttgcagatgttcatgccgtcagggtcatgcaccataacggaactgggggttcgaaaagacatctggttcgatttctttgcagaaaagcttctcaacacaatagaaattgatcaacttgaccaagtccttccgcttcaaatagttctcgaggtattggatacaagtatccggccccggtgcaaaagcacactcgtggttgtcgaaggtcatagttgttgacttgatgattcccaatggaggtggaagaggatgtgagtttgtaaagttggtaagggatggatcgaaggggagaataggcgacaagaagaaacgtgaaactcgcagggccacaataaataatcagtccaaacaaggcaaacgcggactgatggtgaattccttcggcctcattgtttacttctcattgccactacatcagatgctttccaggcaggtgtttggtcgtacttgttacttgtttgcaagcaatgcacaacctatgctctctgatcaaacattcaacaaagtgaaaacaatactttgcattaaagaagtcagctatggctcccggctcgctgcataacagtggaaggttcaaaacgtatccagcacaaatccaaatcctgcactccaaaaaaaccatatttgccccccctccccccaaaaaaccccgggtcctcggcaagcagacgggattcgcactgcttttcccacgttttcaggcttttcctccattctatcttgtcatagtattctgacccgaggtgggaaccgggtatttcgtagcggcgagaattcgacggcagtggatctgctctgcagtaacagcggaggctttattcatcaagccacgttttgtgctggccaccgccttgatgaattcgccaacaagagcctagggcaacaagagatggaatcagtccttgaatatcttccacaaaccatgaacggcttctaggcggatacataccgctgcaagagcaatgagctgcctctccacgatcaagagggactcttcaggtttggcatccccaggacaacgggccaacctatcctcgatctccgcaaccaagaatgtgatcaagtccctggagaccgaaagcatcccctcacataaggacaggtatctaacacaacgagtgattagcagaaaggtgtccaacgcggatcatcacccacttcctccaatgggtttgagcacgccaagacctacaaaatcagaaccgatcacctctggacgaatgccaatacagactagcgtggtgcctttggcagcatccgtcgaaaggtttgcttgctccggcttgggatactgacagatgcagatttggttctctgctgaaagcaacttcctgatggaagggggttttccctctccgtcttggtagacgaaaaaagtcgctttttccattgcatctcggcaggcagtgaggcatggaatgcaggtatcagggcccggtgcatagaccaagttttcagaaaatgacgacatcttgagcgatgtcgagggcaacgacggttgaactttgtgaaaatgaaatggagaagccgggagagccagagtcttggggaagaggcagctaaagtacccactacgtcctattatacctcttaaatcctccagactttccctacaaagcgtgtgaaatatccaccagaattgtccgaacttctcctcgtatccaatttaacttcccgcctcccacatcaatgtaaaaataaccctaacccggatatcatcccataacaacaggccctgcaagtccgtgtgtttcaaacgcttcaagtgatcagttgttcacttcacaagttcggaaggaagttgcggatatggcagctcaaactctggagttgatgggaattgccacttattaaaccaggaagcattgtataaataattctacagcattatccatttcacatttcaatagccaggaagtgttgtgtcataatatggcgtgaaagatgcctccatcttgatgttcatttacctatccctcatcccaacatccatcaattatgctccaagaaatcctcgcttggctccatgggggagtggaggacaacacatgagagctctgctagcagaggagaaagactgagcgggatgtagggctatgcagaacttggctcctttcatctttaaaacttactgtgtgcttttcactctcgcagagaaactcgcagtcgcataagttcgtagtctcatgtcatggcataagacaggaatgatagagaacatcgctctgtattggggggcgatcttgatttgaccttctggtctaaccacaagccagaagttcgagactgccatttcttattgtccccggatccatgatctccagcgactcccgatgtcttcctctgtgccgctgacattccttgcgagtcaacggtaccttggtgtcctggatcactggttgaacgggcaacatgtgtcgaggaatccattcgccatgtcctcatattcggaatccccaatcaagtcatactcttcaagacgttcttgtccaagctcttggactgtagggtcgcaaagaaattggcgaacatttgcgcggaataaggccttcgccgtgcgccagtgactgaacccatcatccccggggagaagacgcagctcgctgcgcttttgccaatctagaaggtcctcctggtcgcaatcccctttcttcggaaatagatgccgagcagcagcgagcatctgaagatgacggatatgattgcgaaggtcgtccgcagtgcgattcttgacggacaactcggcaatatcgacagccttgacgaattcttcaatgagattctggtccgagagaatatgacatgttagaatgacctaattttaagctggaaaggtcgtaggtttatacgtacggccacaatacgaatgagcgacttcttcaaagtggcaatcgagttgttgggcttctccacgtcgggataaagcacgatgcactcaattgaagtaacagtgaacttgatgagatcctggagatcgtaggcatcgccgcgcattatgaccggaatctaagacgaagtattagaaataggcagtacaaagagactctatgagtacgtttggtttggaaaacttacccgtcgacagtggttggacagatcaacgcaattggtgcaagcaccagagctcgagatgttcacctggtccttctgagggtattggatgctacagccagggcgagaacccgagaacaaattctgaatgcaatcgacgttcccgtagtcctgaaaagcttcgagacgacacacaggtatcgggacccggtgcttggtcacacctgagagtggacagcggcatcgtggatggtggtaagactgaggttgtgggtttggcgaggtggtgtggcaaaaaaagaggaaaggtgaaggttttaaagtcgagagaaaattaaatagccggccagaggattgagcggcggaggcaagagccacccgtaccttccaatgatggctaccgggtactattgtccattatttccacttagggcctagaattcagtggaagatacgactgagcaatgttaggtaggtatactgcatttcatgggcagagtacaaaaaaaagacagaagaaaaaaagacagaagaaaaaaagacagaagaaaaaaagacagaagaaaaaaagacagaagaaaaaaagacagaagaaaaaaagacagaagaaaaaaagacagaagaaaaaaagacagaagaaaaaaagacagaagaaaaaaagacagaaaaaaaagatagaaaaaaaagacagaaaaaaaagacagaaaaaaagacagaaaaaaaagacagaaaaaacaaacagaaaaaaagacagaaaaaaaacaggaaagaaggggaagcaaccaggtccacacctcggaagctttttcctctaccacttacatcatgccggcccaaacctcctacagcggaaagtactcctcgcggaatgccttcacatcctcttcgtgggcctctccagagcggattggctcgtcgacaagaacatcaaatccaggctcgagctctgggcggcagagaaacttgcggatgccttcaaagaaggctcgcttggcaatttgccagccgctgaaccccagatccttgggcagcaaacgcagctcttgccgtttcctcacggcacgcacgacctcgcagtcggcgttctcctcggaagggagggggtttcttgtggccgcaagcatgcggcggcggtggacttcgtcggcaggcgcgccaccctgcccttccgactcaattgtgagccgggtggtgactaaaaattccgcgaggagtttctgttaagcaggttagctcccggtttcgtcccagctttgatagcacacacctacagcaacgagaccgacgaggtttttctccagctcagggaccacagtttcatcgtctggctcagtctttgggcacagaacgatctactcgacggcgcaaacagcaaaccggatgaggtcttgaaggtcgagggcgtcgcctcgcatggtgatgggaatctgaaattcagaccgaagagttagaaatgccatttccaccaaatcattcaagaaatcttaggagtccactcacggggatacagccttctttcgactcaagacatgctttcgtcacgcaatccgacgcaaagagattgacacccgaagggtgtggatgctcgcgccggcacaccttctcggcatccgcaaacaagtcctcaatgcacctcgcctcgtcctgcccgcggcggaacgactccagacacgggtgacacgtgtttgggcctggcgcgcgcgagcaggagagggtcgacggtgacttcgtcatggtggctgctggtggaacttgatgaagtcgggtgggtgggagatcggatggtgttggcggcgtgatgaatctaagtgggatggaagaaagagaaaagagaaaaagaccggccggcgcgggcgggcgaccgggggctggggtgccagacatcgacggatggccgggcccagcccgggggcagcgaggccgggggtacacatccgggaccgggatgtcataccgggtgaggtaccggccgcgtaacaagagtcgcttgcagtgatgctgttaaagctgccagacttccgccgcgttcccctcggggtgatagtctagaagactatggaaacccacaagtcggtcgccgattgttcataacaacacggccttatgtctctgtttttttgtagcttggtatcttaagaactggtatctccagaaaccgttctcttaagctgggacgaattttgttcagtcctctctcaagttaagcacctgggtgttaaggttgaagaaggattggaacggtcatacaaaaggttgctatataaattcgcgatacctagttagacctttgggaaatgtggcaatgtgtgctgtttacaggaataatagactgcccaagtcaatatggcgccttaaggtaacgaaggtaatcgatgaactagactgaccgagctgtataagcaggaacatcacaaaattcgataatcaaaacagcattgaacagaaaagacagaaagagcaagctctctgggaccaatcctcaccaaaaaggcagagagagaaagagagagagagagcaacctaccatttgacacaatcacaataacagaacagaaaaagatcagacgaaagaacaacagatcaaacaaaacaccaccccccaccccccatcacaaacccacaatgatgagccaaaacaaacagccgcaaccttcaactgttaatcaaccatcagaacaagaacaaagtaaattccaatctgtaaaatatctccaaagaatagtaatctaaaatctcaaactctctctttaccgccccaataattacccattttccctccttactacttccctccccaatctcactctaccatcaacctgctcacaagcttgctctctctccccgtgactgtgctaatgtccaggatgacccttccccttcccctcaacagcagccttcaccctcccccacctcgccgctccataccgattccagtacccatagccataaccccctccatatccatacccaggctcaggcgtctcagtcggggtgctggttgtttcgtcagaggtagcagtggtggtagttgcggtcagagtcgagaaggtggttggttgggcggcactggactctgtggttacaccggttgggtcgacagaggcggtttcagtagcgggtgtggttgtgttggagtattgatgggatgacgtagatgggagaagtgtgggctctgttgtgccagtttctgagaaaggaatgctggaagtggaagttgtgaagactgggtcgacggatcccgtttctgagatgggggctgaggaggtgtaggacgctgtggggtcgatgaccgatgccgaggtggtggaggtgtaagtgtaagaagctgttgggtcgacaactgctgtttcggacaagggagatgaagaggtggcgtaagaggaggtagaggctccagtggggtcgacgcttgcagtctcacttaaggggaaggagctggtgtacgaggctgttgggtcaacaatcgcagtctctgacaaagaggctgaagtggtggtgtatgaagacgaagttactccagtgggatcaacgcttccagtggtgaaagtagggtcgacactggccgtgccagacgagacagtggaagagcggttcaagctagaagggaaagagaaggtgtagctgccgtaaacaggcctgctggtggtgctcgaagtgggaatggaagtctcagctctggtcgttgtagtgttgacgaaaacaggccgagatgtggcaccggaagtgagggtggaagtgaaagagaggatagggtcagcggtgcctgttgtaaagatggtcggctccgacgatgttggctcgatatatgttctcgtagtcggtatagtagagccattgatcgacgtgttgtcggtggagagagcagaagaggaggacagcacagggtcgttggttccggtcgtagctacagagccttcagatgagggggcaactgtgggcaacgaggagttgggtagaccagtaatcgatgtcgaaggactgcccggctcggtctcggagatcggatcataggtgcttgtttcggcaccagaagagctgggaagggtgctcacgctccacgacgtgggagccgtgaagccgcgagatgacgaaataggagtgacaatcacctcgctgactgtggttgaggatatgtatgttggctcgtaagtgtcggtgtctgaacctgttcgaactaccaatgagttagctactgatgttgacacagaagtcattgtgcaacacgtacctgacgatgtcgtctgatacgtcacgctcggctggtacgagtacggggcgccagaggtatggttgctccagataccagtcccgctcgggtgagggaagggatatccagtaccaccagtgcctgttggccaaggaatccagcgagaagtggagggcgccgtgactgtggcgaagacggacgacgtcaaggtcaaagtcacaaagctagtcgagtcgacttcagaggtcaccggcagctcggtggccacagaagaagtggtcccaactggatcgacgccttctgtgctggaaccagtgggaatcgaggagacactggcagcaacagtcgacgtcaggtcatccgtgatggaagggaatgtctccataggtgctgtgctgactccagttggcaccacaggagcagtggtattccagcgacctgttggtgtagcagatgcaagtgagtcgctgggtccagtgccccagggagcagtaccccagggagcagtaccactgctaggaagactggtgcggctactccagacataggtcgagtttgcgtatgatggaagcaaggttgtgcctcctgtcggggctgtcccaccagtcgggccaacgatgccggtggtggaaagggatgctgaagtgtggttgaaccatgcagatgaggatagcgaggagcttcctggaaagttggagaccgtgtgtccaagtgtgcaggaagtcgtagtgggagcagcacgggatgaagagcaaccgccatagactgtgaccgtggtcgtagcataggtaggggtgcaagagccgatgcgaactgtcactgtttctgtaacggtctctgtggattcggcatggacaacatgtccgcggtcaacaggaatgtgcgctaaagcaacggcatggctattaaagatcagttactgtgtcatgcgagttgaagaagtcaacatacccaagactcaacagagccaacgagtgaatacctcccaacatggcggcggtagagccttatcgtatgctaaaagaacgtagcggcacctctgaatggacggaggaaagcgacctgctggctgaagaagaagagaaccatcgcaaaaagcatcctcatgaccttcttatatcattccacaaccagcaacatgtttcgtttcccatcctcctgtttggtcagagctgtgcccccgtcaacggccgagtttgcccttcatcataggaacaaccccggtccaagcaagatgtcaccaacctcatgtttgcactcatttgggaaaggagccagaccgatgtggcttgaaatgtattgatccgccggtatgaaaggacgcacctggggtgtgtcgtgagtgtttccacggtgcgccaccttcgaccgttgccaaaggcaaaccgatctcgccaaggaaaggacgttttggagacggccttgtgtgacattaaaacagcctcgaaagggaaaagactaaacagagacccggggaatcctggtgagtcctctgcaagcgagccattcagctgttgctgaatcccgtttgcatgcagctgcaccgtcccgatgcttttcacggccgcatatactaccggtggcgtgcgcactgcaccgggagggaatgcgagatagccgaaaggacttttcaacgttatatgatggctgttacatgacgagtagggttgctagttggttgtaccatgcgcggctcgacgctcggtattggtaagaaacgggggctggaaacgattttggttgctcgttggtctcagagtagatgtcacagactctagaaaagaagtctgggatctaaacaagcagttcgtcgttgccagcggaatgtcttgatacagggttggcttgtcttttgcaggggtagctgctaggtgtcagggacagccacagtcgacgcgcatgagaggacatgtggtgtcaagattggctgtggtctgccgacgcatacccaactttgccatttatcgagatatatcacggaacaatccatctctgttcacctagcgtcgacaatagtaactgcgaagaatgttagcaaaaagtcaagatacaccgacctccacgtggaaaggaatacacccgcatgtctgccacgagcgatggaaaaatagcatggtgggcacagcgatgaatgcacggtattagttgagtcaaacagagacagctccagctgtggaaaggcactcgtattgttcatgactctgattctcctcgttcctgcagcggctgacctgcggctggccgatggcaaggcgacacgaaagccgtgcttccccatcacagacgggcgatgcggctgccatagctaacgcccagggagtacaaccgaataggcgggctttttcaccaaagaaattggcggaccgacctgcggaaacggccttggaaaggggcccaccagatcttgcatgttgacgacgtctgctgtgcgcgttacctgtcatgcctgaagatcggtgatccgggacccggggtggctggcggcgtgtttccaagcaaatgagatgcacgtcagataaatgaggatgctgtcgtggacggagtcgtgcattaaagtattgaagcggtgaccaggaggcaagaaacctggagactcgggatcggaagcctcagtgacggaagccgggcctgtccatcaaccatcccgaccggagaatacggggatagtggtcagactcgccagttccgagaacaacctgacctgctattttggtaagtaatagaagtttctggcgtctgttttgtgttctccggtgcggaacatcgagggttcaagggacactggggctcgacagatggctcgagaactcgaggtctcggtgagaaagctgctgaaagaaatcgagttctgaaacctgtgactgggagtgaggggatgatcctggacacgataatgacggatgcacaaacccggaggcctaggtgtcttggaggagcgaggatgatgaactgagaatgtcttgatgtcatattcgaacgaccgctgaacaacatatccaacaaaatacctaccctacgaggaaacgttacaattttgtagcttcgctggtgcccaagaagcgctcctcggccgtcttccagttgatgacgttccagatattctcgacatacgcagcctttccgttgagatactaggaaccggatgttagctttcaagatacagcaaagaaaagagctcggaaaaaaattacctgaagatagtaagcatgctcccacatatcgacaccaaacacgggaacatctcgtccaaccaccggatcttgatccttggtggtcacgatccgcagcccattcgcactgtccttgaccagccagccccagccacttccttgaatccccagcaaggtgctagagaaagcgttcttgaagtcgtccagactgccccaggtcttctcaacagcagccaccagctcttttgcagcctcgggctttgtctcttcgctctcggcgggggcaaggttcttccagaacagcgagtggttgatatgcccaccaccgttgaacttgatgacctgctgcatctcgatctgactggcaatatcgcctgcgccaacagcagcaacgtgcaacctgagagcgttgttcaagtttgtcacataggcctggtggtgcttgctgtggtgcagctccatgatctgggctgaaatgtgcggttccaaagcctgcaattcagtgttagcgcatgacacctagcagacggagcagtcgagacttacattgtaagcatatggcaatgccggcagggtgtactcttgaacagccatcttggtagcgttaaagtcctcgccggagaaggccctcaaaggcgcctggacggcgagatacttcaagatattgtcaaagttgaccatgattgccagctagcaaggtccccagagatccccagagatgtccacgaatgaaagctccccaaaagtgaaacgtgctcaacgcagtcctcggcggatcagctgtcttctgctttccttgtggagatgccgacaatgcggtattgacagcggacgacagattggtgatggcgaacggtttgtgagcggtgtccttgtcactctgaaccaacccgcgcaaacatgctcaatcgaccgcgtccctcttgtcgcgcggccggatctccgagcgttgcagcgttgcggatcatggtggggcaaccccttcccaaaacaggccgccaagcagtgtcatagcatctcattggtcaggtggccacaaccctgggtcacatccccagatttctggcacgggtcgccctcacacaaccctgcttcccgaccttgatggccctgcccttcaccaaccttgatggcctagccttctgcatcttgagacacctttgagatatgcgcgcaacgagaggcgagcgggaagctcatgtatcccggcaggtgaagtaggatggaactaccttgatagctggaataaatacaactgtgtcccatcatcttgagtttgctcatcttcaatcccagcttcaaatatctacatcacaaccaacgaaatgtgcggcccagaaaccccctccaacctccccagagtcggtgctcgtgtagacttctactcgtcctctacccgccaaccattaggaaacctcctcttccacaatccatccactccttccagttcaagcgctacccacgtccggttctcgtctccttcatcaggctcagcctgttcttcacgatcctcttcaccagtgccatctaagaaggatgatgaagatgtcctagtatccatccagtgcgctcaccaccttgttaactaccatctctcatccagagactaatgaagttctagtgtctcgggcgacatgagcaaacccatccgagaatccggactgctccagcaattctttctcccaagcacatccatagaagcacactatgaggttgcgctccgagaaaagctgtcacttgtggttgggataggcatcatcggacggagagtttccatgaccagaggcgatgaggtgctggctgatggtatcatcgggttcaatgcgctgccggaaagcatggcttctctttgagtgttgctgcagcacgtttttgtatttgtcagagacgttgaacgtcgtggttggcttattagcattggttcgggtcaggatcaggttgggatgcttggtaccggcgtttgtggcttggatcaaggggagcgtttgtttggtcaacaaagaataatggcttcaagatgcatttctaatcgcgatatatgcagacgcttacggctctttgccgtgtgatgacctcttgaagattaaatgccatgccgcccaaactccaaacaacaaaccgtccatcaagcctgggtctcgtcccagtccgaccacttcctcacaatatcatccaccacctcaaccgccttcctgctcgcctcaacctcgaaccactcccggtgctccttgccacaagcctcgcacttgccgcgatctccagctctcagcccaagaccatctagctcaatgtgcaccaagcgttccaccttgtgactatgaggtactttgcgctccgtcgtagttgtgctgttggacgggacatagggatagtaccgaataagcgagatgttatacccgcactgccgctgccattcgttcaacctgcgctggacgttggtagcccgaccaatcttcaacagaatcttcttgttggtgtgcgaacttcttccattaccactgctgggacggggtctgtcatcatcgtcgtcgtcgataaaggccgcaaacgaggcgagcatgtcgcttatcgtcctggaacctgacggtcgagcagatggtgatagcaaggaccgagcggtctccgctgcgggggtcaaaggttgggactctggagtcagccagaagatgtaaatgtagccagggtcgtcattttccgagaagggcttggctaattctttcgctagcttcgcggcggtttcggggggcgcatccgcgggaatcaacgcggcatggttcttcttctgcgaagatgtcggacgcgcagaaggaggcctggccgaacttggtcttgagggcttgttcccgctcggcctataaggcaccgaggctgatgtaggcttctgaagtggcacgggctgagggcgagggggaggcacgagatcgtcgagcggaagtgtaaagcagaagcagcaggtgatgcccttcttcttttctgggcgcgctgactgggagtatccgccgctgtatttgctgggcctaggttcagaatgtgtcttcacgagacctagcctctccgcaagagtgtctatgctcgttcgtccctccagtatcggtgtatgagacagcttcgggccggggctcgagtgggcggacatggccgcctgttccttgtgttgccagcagtacaagtctggatcgctcgggtcgtcgacttggagtttgtttctcttggactttggcgggggaggggcatcatcactgaggagcgagcgcctacatgggcggccgctgcctgtgattcctcgacatgtcgtccctggatctttcgagtcggaacggccgaggcgagattcgggggtgttggcaaagataggcatggcgctggagctggttgtcgagcgaagacatcggccagcagactgtgagcaacttcaagatatatacctgaagtagccgctgagtccactgttggtgcgtgactgcaactgcgcgcgctggcggttgtgggcctgcatcttgggctgcctggtttcaaggtgtggatagttcggcatccctgagccggcgctcgaagtcagggggctgggtctgtaatggggaaagtgtggctgacgcagccattttcaggcacagccacgttatgctccacctgtcagggcgcgagcttgattcgccgttgagggagccacgtgttttggtagctgtccatcaggtcgcagttccatcaacactatatcagatgggattctgcacatttgcgagtttgctcagtcgttgaaacaatgggttgtttctttgtaacgagttctggttacaatggcattcagctgcagcaccacggctcggtgagccgcctcattgctcagctcggtgtcacacaacatcaaacagtcaggcagagcacgttgcgtttccctgcagcaagcaactaatggttggtcccattccaggaactgatgaggctcgattcccaatcggtggccttcaattgctcagaagaagatatccttcaacgcgcgaacaccgcgttaggcgtaacattttgcgctagcttcagccaatggtagcgctcggcttgtcccaaaagggcaattggacaacatcagagagctgccatcgccaatggtcatgcccagctttctcttgtcacaaaacccatgcttagattgatagcagcgctaacagtgacaattttgcacacagttgccgattttcatccatgatctttccatgttggatcgatgccagacacaacaccctccggccattaagttcagagctccgaagcacctcccaagcaacgttaactttcatgtcacttctccaaggattggccatggtcagatgtgagaaggcgacttgagagtgtaaaatctctcaattgtctgctgttgcccagaaaaaccagggttcaattctcatcgagaactcccctgtaaaccttggttcctcggtgtttttcgggcgtctgcacttcgatatccacatgttgatcttgcgcattggagcctactggcaatgaaaactggatattattgtgaactacgggctacaagtcgggcgttctttttctccttcactttttacctgatattcctcaaccaaaccaataagatatcgcaaccaaaataaactccaggagacagaaaagaaaacacgttctaccccgttttacgactcacaactcgcacacatatgcttcacatccaggttacctaggttaacatcacttctttcccttcttcccatccttgacccccttcttatcgttatcctccttcttcgcacccttatcccccttccctccatcgccttgtgcattctccaaaaactcgcgcaacctctctgcggtagtcatggtatcaacgtgcgtctcccccaagacttgctcctgcgttgcgagcgtggcccgaaacaagtcttccgcctcctttctcttgtttctggcagcatagttgagggcaaggctttgtgccgtatgtaatgtttccggggcgtccctcccaagccaatacccctgcagcccgagtatcctctccagctcctgtcctgccgcttcccactcctcggcttcctcgaggaacaaagcaacattgtgtcgggtgatgagggtctcgggatgggtgtccccgaggactttgatctggctctgcaaggcgagcgcgaacatctgctcagcctgtgtgtttccctggcgggcgtagagacaagcgagggcacgcagcatgcggagacactctgggctttcagggccaagtctgtcgcgggctatgacaatggcctgtgagaaatgttgttcggatttggggaagtttccttgccgttcgtaggctatggcgagggagtagtgagcgttggcggtacgcatggtgttgaggccgtgggtgtttattgctgattccagcaggcgttcaaagagcacagctgggtcgtcttcaagggtgtctccattctgtggtgctaaagaagaagagccgttgcccgaagggtcattgtttccaggtgtaccagaagctggagatccactcgtgggtgctgggaggccgcggttgtttgcgaggttgttggccttggtctggctgggctgtctcatgcttgggtgggctagtctcaaagcagccagttcggctagcttttgaatggtgctcgtgtgttcgcgtccagagctctcttctagaagccgaagctcgctgcgcagctcctgagggttggggatgaagcaagcacgggatgacggtttcttgccacccgccacagacaggcttttctgatccaggccgagtttgtcgagagcttgtctggctgtctcgacatctttgtctgacagatagtaacgccgtttcgagtcttccgaacgtcgagtgagagccttctcgaagtgcgattttgcggcttccatccggccaatgtgctggtagtactgggcaaccttcaagtgcaaagttgcagtgcacttgccttctgaaaacttcgtacgaaactttagggcagcaaggatgctggggagcaatgcttcatccaactcatgatcaccatccttcaaggtctcgtagagctggcgaaggaccttctcttcaattaattccttctctttcctttcctcaagatagcgttgcagacagaggcggacaattccggtcacacgaatgaatctatcatctgctgacctctctatcatgccgtacatttccaattttggggtcagcttccagtcagccttctggaagaagtctttcgggatactctgaacttccaagacgccaactgagcaaagtaaacttgccgcttctgggtgctttttctccatcactctgaatagtcgtttccaagctagcatggcattcgtcgtatgatcgggtttggtcgagtcaggaaatccgaccatgccttcgtattccttcaagttgatcttcttgtcgatcttgttgcggtaagcgtgtggaaatgcaaggacaccagctgtgcccccaagcttcttggccagctgtttggcttgttcgaacctcggtgtgtcctttggattttctccaagaatcatgaacacggcgtctttgtcttgaaggggtttaacttcgacgacgaattgcaacctttccgcaaagcgtcctgccagacgtgcctgccttgttgtaaccagaaccgtgctgtgtctgcccctgggaataaaatcccaaaggctccgctcatcatgtgtgtcagagtctgtgagccagtccagcgaggattcatcgtcaagaccatccacaaccatcagccaatgactgttggcgcttttcttgagcgcgtggcggacgtccctcacaacatcttgcggcgaatttgggtccctgagacggacttgaaggccctccgctatacgcttgtatgagaactcgaattgctcggcgctgcccgcgtcgatccagtgtatgtgagcgccggggtttgcgatacaatatcgataagcatattcaacggcgatgtgtgtctttctgtggccggttcaattagtctgctgcggaatccagctttcagtatggacaagtggcatcggagatgagagttaaagatgcttacccagtccctaaacctccggtgagtgctactactaggccgttttcgtcatgaaactttttttcaaggagacctaatatgtctgctcggtccacaaagtgaccatccttcctgattggaattggaagctttgccaagtgtggcaggtgactgtgagactggctgggcttggaatctgttgagtataggagtcagactacttgtctagtgatctgcgtgggtacgagtacaaatggaaaggagaagctgtttggattccgtcaaaatgcagcatatggatccaaatattcctagttctcggcgaatagaccccatggtctgaccaaagccccgaaaccctgatgaggaaccaccttacctacttgcttcctcctctcctggttttcccttgccaccttggccattttcacaatctgctggcggactgagtcgtagttggcatcttcattgtcttcgaaggtgttcatgttgaagtggtcggcattaagacctgtggagccgtggccgtagactgtcgcagatgactgcgtaacaacaaattcctaaaagagaagttgagatgttagtgatacccacctggaaggaatgttggaaatggaattgtcaacgtacctgaggcagacttccgatcccaccgagcttccctatgctggacgcatacatctcgtagaaagagtagatttcgggctggaccttgacctcattcttcagtacttggttgaagtcctgaacaattccatgaagcatttggttgttgtgcgtcatgacctcgagtgtctccaagtgggtcttcacttgagcggctacgattgctcgatagatatcgccctccgtgctgagtgcggagttgccgtccactccagcatgtggggtaccaagaaagataagcccagtgatggcgtcgatgagtccaggaaagttggatctgtgggagtgggcgatgtggaaagcctgtatggaatacatgtcaagagcttgtcattgatgggtatggtagagaaacacttacacgctgaagtatcaagccgccaaaacaatgagcgacgaatatgataggtcgttcggtgcatttctagacatgacagagttagagcgcagcttggatagaaactggggcatagcctacctctctcaacttccccatcaaagcgttcagtagctggtcagccgccgtattgactgtttgcctgacagcgttttggccatgccaggcagactggtatccaaagtacaatatccttgctctaggcaaatcggcaggcagcatggacttgtcatcaagccagttgacctttgttgctttgtgtgtccaagtcttgtaggggtcggcaccaatgccgtggataaagacaagactaggtagagtgccaagttagaccgctgcaaagaaacatcaacttgtacccaaaagaaatggcaaggttctcactcaatgtcggtttcttcctcggcaggttcaaccagcttcctcaagcccaaatactttcgctcgactgtaatcattgccggtagcccgccaggacccttcgtagtctttggctttgaagcatcctcggttggtcccttctgcttgacatctgtggatgtctgagcagtgttgcttggcacaactggtacctcgggaccgggcaaaggtttggaagctgacttggattcttgggcagtgacaactggtttctcggtcgctggctttgtggcatcttctggagtggtactaggagcaacctttgttgcacttgaagtctgtgggtctcccgcggattgacttgtagtaggtgggtctggctgggttccattgggcttcgaggcagtgttcgtagccgccgtcgagacttggggagggccatcccctgggtttgggctcttgggagccccgctcaaccctggggtctcgttctttgcctcgttggttgtcggctttggctggtccatcttgaagaaggtattattcacttaaaaatgttgctcaggtagaaagtctattgaagtgagaaatatgatgataggtagcccatgggacttaagtcaggaatgtccctatcacggcagaggtcttataatcctgtcttcatgctctttcagactgcgcgtcgtcgtgcctcacaaggctcaagcatcatggttttcagccgcattgtcaaatcccccaagtctgagccccaaaagcctccctcacagggatgtttatgccggtgcctgtctttccattttcagactatgatgatgccttcgccggtcaggatttgaccaatcgaagtgcaagaaaaaagatacttttacctgaagtactggccagttgaaaagggcgttccagcatgagctgcatgcatgtgcatgacctaaattgcgacctttttacataaccttgtttgagaaaaagcaacctatcaatcccaatcacttctgagcctgataatgctctcgtgaacatcatggtccggtggagatgaggcactgcccgtggttctacaaaaaccgtctgtgcctgaagcgggaaggattaacggtagccgccgccctcccgggcgggtgccatactggcgacaggcactgccccaactcacaaactcggtcagacgagatagcaggttggtggacgccttgcggaaagggcttgcgtctccacgcataacaaatgctgcgcgcggggaatgcctggcaaatcaatacgaaccaagtcatcagccataggcttgtgtgacacaccagtggcttgtagatctcaaccactcgttggtccagcatagtcaagaaattggcgccatgaattcaaggcacaccaccagctaagaccgacgacttaatgactagctattgttgagttggacccaaatcactcagcgcttgtagtcttgctttattctctctttggggctaagtgcatatatggaaatgcacaaatgctcgcgatagaagtcgatcgaatgcatattcaagagttttagttcagcagccccatatttggaactcagcttctccaatttccattttctcccttgaatctcttccaacacacaacgccagacttacgtatccagctgccaggctacggcgacaacctcatccgacacaatcaagcccggtcccactaatggcggctcacgaacaaaccagacctacgatgaacccacctgccggaggcacagaaaacgaggacaccaccgtgcccggtcaacctactattccgttcaatgacaatgcgaggatcgtcactttcctcaccaccgacctctcgaccgaaagattgaacagtctctattcgctgctattcctgaccggcaagcctgagaatatctcccccttacaccaccaacccatcaaagggcgcacgattctcatcaccgaaaggcctgatctgcacctcatttggaacatcgaccggattttcatcaaaccacttccgaaatatctgctcagccactcgttttggaaagcccacctccaccaccgacctggcagattggacattacgacccccacgttatgcaaccccaaagacaccctccgtctcgaagcccaaggcttcctgcgcacttactcgcgtctcatccgacacgagtcggactttgatatggcccaaagcctgggactcctccccaagagtctagactgggccggttggtcgcattacatacaggcatatgcataccttcgggacacccaagtggccagacgctatcactacggcgaacttcgcttgccaagactcaacgcctggacaatggtctgccgcggggaacattactttcaaattcactacgaccagttgtccttcttttcctgttttggcgggccgtatctgctgctgttcggtgcagttacggtgatgctcgcggccctgcagacggctgtgcagatggtgccggaggggggtccttaccgggagtttgcaaatagctttgtgcccatgtcgatcgcgctgacggcggcggggttgctgtcttttccggtgctgtggtttttgttcacgatgagggagctgtggttgtttatcttccgatatcgatcgcttgctttgtgagacaatctcgacaacaacaccacaacccaatgtgtgcacattttgattatagaaagttgcttttttcttcacaaatccaagcataaaatagaatctcttggcattatcaggctgtgatccattataggggtatttacactagcaacaacattgccatgagacccacaattatccctttgttggctccttttccgtcagcaaaaacacacttacataggtaggaaaacaatagattagactgtcaatctgaaaactcaataaaaaaaatgaaaaaatggcaaaaccatgtgtgcgtcatcactactgttcaatgaatcccctcggtccttgctgctttcccttcacaaccttcttttgccccggagccgctggtccaccaatccgctttgacatctcctgttccaatagcctcatccctgccttgttctgctcgaaatccaattcctcgtcatgggcatcccattgatagtccaccttttgctgattgttggcatgtgcgaagttcagcttgttctggtctgtgctgcgctggaagtccaactttcgctggtccgccttcacatcgagcttggccatcgacttcttgagcgtgacttgctgctcgcctgtcttcttgacattgtcgcgggtttccttgttcatcttgtggagctggtgaaccttgtgcttatcgactgcctcggtggccttgagcttttgcttttccatggttttgtgagtgaggagtttctgctggtcgatcgcttgtgcggcttgaaccttttgccagtctgttctctgctgggtgatgaatttctggtagtcggctctctcctgagtgacaagcttgtggtggtctgtcatctgtgtctggtggagcttttgctgatccatcatttgggtcttgcggtaagcctgatagtccagcatctgtgcgaggtggactttctgattgtccatcacctgctggtggcgctcgttgatgtgatgcttctgagcgagaccattgttgtctaccgcgagaagtccggctttgtcttggttggcgagcacgcggccccggtgagcaatgtggttcttttcttccaatgtttggagttgctggagtgtgacttctgcgtcttgatgcaacttgctctcatgaaggatgttgctattctggaccttgtgaactgtagcttgtccttcttgaaccaggcgctgctcgtggcgggtttgctcaatgaaaatcttctggaattgtgcttctttatcccgacggagctggtcatcatggtcccgctggatcttctcaaggcgtttgatctcttttgcaagtgtctcagggtagccgattgcgccgagtggctgatcagcagcgacgtcagaccagtatctatcctcagcccccttatctctcagcatttgctcaagggcgtagttaagctcagcttccttctccgaatttgatggatggaggaatttgagatacatggttggtgagtaatgacaagtgatcatgcttcccgttttcggacttggctcttgcagggtatatacgttgttgtcgttgttgatgtcgtcccagaccatgtcaagaagagctttgatcactgcgaacggtcgcggattttccagagccaatatcagggcattcttccatttcggtgtcttccaaaattgaaaaaggtccaaaccacctttcttgagttcaagaagagtgtcctccatatccacctgactgccactcccatcacagcagcatgccatttcatgtaagggggttcgaaccccgtgaaggaaagacgcaaagttgacagaaaagttcttggtcgctatcagggcacggcaaaccttgctgtggaggttccttgcagcttcgtgaaggctgccatcgttgggcctgtatggcatcttcagcagagccttgacaatgtcaaggtgaccttcgcgggatgcatagaacaaagcggaactgtccaagctgtcccgtattcgggtgtttgccccggctttgatcaggtgattgacaacttcagcatgcccaaaggcggcggcaagaatgagcgctgtggccttcgaaaccggtgccacaaagttcacatcgactactgtacgaccgttattagccacatactcagaagaaagtattggggcacgtcagcctacctttggcttcaatcaatactaggatgacacctggctcaattgggcgacttcctggtggtcgaggcagcaaactccagagaagggcggtacaaggctcaggaccatagtcgctgccatatagggcggttggttccgtcacgtcgaatttgacgcccaacttaatcaagcgcttcacaagtttgatggaaccaggatgggccgccagacactccctgactggcgcgcggagttggggtatcgtctttctgaacgtctgaacaacattagagccatcagatgatgtgacaatgtcgatgaacaaaagtgctgtctcttcagtcagtgaggtaaccatgacttcgaagaaagcaccctcaatcgtgtccactgttgccccacggccaagaagcatcctcaagacttcagtgtttccagccctaactgccagcttcagagcttctccagactgaaagttgacattggcgtgtccaacactgagcatagtctcaaccatagcctctgaacaacggtgcatcagatatgcctcaatggcaataagaaaggcgtggttggcttgctctctccctcggccaccccacgtgagcagatcatggacaagccaaagatatttgtcgtccggagcgagccagtccttagaagtctggatgacaccctgcaaggcatcaatgactgtgcgaatatcgacataggcagcgaagagctcgaaagcatcccgctcgtagcttttggcggcatgacagaaggcttgtctgacatcgctccctgaaacaccaagatgaagtagtgcgcggattgtcgagagaccagccggcatttgccatttaggatttgctagagcagcgcggaatccagccaagacttcttctggtgactgactggcatggggtagaaggttgaggagtgacagatccaagcttctacaagcaacttggaacaccgactgctcaagaggttggcgattgtagccagctgcatgcagtagtcgtttgacaatcccaaggcgtacctcactatctgcaaggccaatagaagcagagacagcagcctgcagagactgtagagtgactgaaccagacaacaggacggagagaattcccagccacccctttgtcgaagcgagcacaagcggctggcctccgttgaagttgacatctgcattggctctttgtaccaagagttgcaccaatgaagaccgtgacgtagggtcgccctcaagagaatccccgtggagcgatatggcgagcaatctgttgactggctctccctccaacccagcaggaagcaaaaggctggccatatcgtggatgattgaaatcgacctcaccgaagctagcgagtcgactgttgtagagatggcgagctttgacggccctccatacagcacggctttgagcatcggcacagagcggctctgaatggcagcatgtatcaccgccccgttcttatgctcgattgatgagccatgttgaacaagcgactggatgagctcaaccgaccgcctctgtttgacagcttcaagcaagacttcatctctcacaggaccttttgcccctgactgtagacaagcaatcagggcccggtctagaccagcggtgaatgcttctcccaccatggcgtccaagacaagggggatagatgccatctcgggtgtagacgcaatggcgacagcaatatcttcgtggtgacccaatatcgcggctttgagtgcagctgcattctcaaatttcgggtccgcctgtgcgtccagcaaattctgaaccttcatgtagttgcctgatgctgaagcccgcaccaaccccttgtgccggcagtctccgcacgctcctttaagctttcccagcaggaggggaagcatgtcattcggaccgttgtccacagcatgcaaaaactgctcatgcaggggctcagcattcgcaccaccggatatcaagacagacgctttggccgtatcattctgggtgatggcaaacggaagtgctctgtcgaacgcgtcttggtccgccttcagggcgagtgcatagacgatctcgtatgagcaattctgcacggctctctcaagaacatcactgcgaatatcttcttgatctcggccggtcataaccttgaagaggttggtactcttccgtcgcttgatggaagcattggcttcgaagtcggtctgcaaggcatagacaagggccggagttgcatcgggaacttttccctcgacgatacttgcgagaaccgcattggcgtctttgtaggtgaattctcctttggactttcgactcttgttattgcagtgctccgacatgagagctttggcccgggccacttctttctccgagaatttcatgtcgggtttgaagatggtggacacggttctgcacaagctggccctcacgccgaaaggtgatgctggtgaggagagtggaggcgagtagggggttattggtggactcattgggggactcattggtggactcaatgtcggggtaaaagcaggagatgctgagaacattgttgttgtcgatggtgttggtggtgttgaaattgttcgagtggagcccactgtgagatgcattggggcttccatcgtttcgaagagttggctacctacctaggtaaagtacctaggtaacaatgtctgaggagggcttttgatttcaaacacagcctagctttggtgagatgaagaatagggacaattgaaggaattctttcctgggaatcttctgggtaccctcttcccacggctttgggtcagttctagagatgacagcgaactgacagaacttccatgtgaggctctgcggcaaagcaaagcgcacaatgagcggagaacatgcagtgttgactgcagtgtttgtttcgatttcagacattttaccggcccggatgccttttgctggccggtgtagcaactgacccccactgaaaatgcatgtggtcatttgttgtacaccactacagcaaggcgacctatgagacagtgcagacgccgtgtacttgaacaccatgtacctttctttataagacatctccacggaccacatctgaacatggaggtggactaattaaaataatgttggggctgtgcagccacaacggttccagcctgggggccattgtttcacatgttggggtcagcacccggtattccaagagttgccttgtcaggctgaggatgatcactgaactcctgaattagtgtttgcctctggccactcagtaggttagcatggtgttgttcggcgcttaggatcagatgcaatctccctttctttgatctatctagatactgtcgacccagggataagtctttttaaacctgacaaaccttctcgtcatcgacatcaaagctcattttgtccaaacatctcaaatactctcctattcgtacaactaagcacaatggcaatcaacggccctctgaaagcagtacctggctcggcagagtacctggagtctcagttgagtggtccagagcttagctgccggcactttcccaagtaccgtgccgaggaggaccaccgttacccgagtcgtcttggctttttctcttccgatcccgagcccaagattacctaccttgacacaaagaagctctgcattgcctgtctcgtagccacagtcccagacggattcaactacatccctccttcaacgccagcaacgtcagcgcccctgccaatcaagacaccagagttaccttcacaggtattccaagctggtcatcatcgtctcaaccgagggtctcaaccggtgcccacgcccagtcacctcattgctccacctgtgtcaatcgacttggcacagtcgccatggcttcaacatggttggagctggatgaagagccaacggaagccattttacgtcgatgcgttgtaccctttgaatgatcggccacctatcgttagggcaatagtcacgagagatgctgaaatagctacccattcggggaccccgtacgctggtcaaatcatcactctcaattcaactgttttgcaaacagagtttcaacaatctaccgtgacttcgacgataaaacaagtcacggtcaaaaagaaagaaagcgaagatggaaaaaagaagaaaaccgcaacgtcgacaaccaaggcgaaacctcaagacacaaatcgcggccccaagtccacctcctcagacattccgccagtgccaacgccaaaggtcgccgcgaaccttcagaatgatttaggacctcgctctcccaatacagtttctctgagcaaggcatccagcaaagaagcaacttcaacaagcatcagttcaaagactgtcagcactacgggctccgtccagtcgaaacctcgtaacggtacgtcggatacaaagctaaaggcagaaaccggcttgaagtcagagggtttggtaaagtctggggctcacagttctgctgcatcatctgtcataccaaccgcgaagatcacagaggagcgccatatctcctcgtcgattaccaactggcaagacttgatgatgcccatgccccagccaactcctggcctggataccaaagccgtggctggaaacgtcgtcaacaccgaggcaagtctcgctggcaagatatccctgggacaagccaaacctcctgggaaggacacggccaaccttacacaggtaagaaatacaagtttgacagaggtctgcattgatagctcagtcgtaactgacataatctttcacaggcagcctcagcaacagcagccgcacggacaaccatcacacagacgcaacagtcaacatcttcgtcaagccaacgttatcttgcaaagaactggagccgccacgaccctatcccatttcaagacaacagccacataccacctctgaaggcctacaaacgtaccgcaggaatacaggggcaagctagcgaatttctgcctttagagaagctattgcccaagggcactgttgtcgcatccgatgaggatctttccacgttcaaattcccagacaagtcctctggtcctctgcagaagatcttgatgtccattcctcagacatcacatgcccccaccggcggcccatccgtgtcacgacaatttatcgacagtctcttgtcaactacaacatccacagttcagacaagtgcttctatggtccagacgaggggggttgtcggcttggatggacgccagagccctggtcaacaactgccagcggcgcagggagccaagacaacatctctccgacagacagttggtcaagccattggtggtcttacctccacaaaggcaacgatgcccttgccaaccaaagcaccggctcagtcatctatccccggatcacaagcagtgcagacagctgcgtcaggtattttcgctgctgcaaaacagaccatcagctcaaaagaacaaacccggagtgccccccaagaggacaaagataagaccaaacaaagagttccgcctgtcgctgctaagccatcgcaagtcaaggagtcttcaggggcagtcaagaagaacagtgacacaaagtctaaagagacaaaggtgaagacagaacagaccaagacatcctccaccctcgccgcctctgccaataaaacatccacgagttccaaaaacacaagcgagtctaccaaggccaagaaggaaacttctagtgctgagacgaagacgcgtggtgcgaacaagcggagcgggggcggggatgggaagtctctggtgggctctgggctgaataagttgaaggacgttgtagccgcagttgcggaaggctccgccggtcttcacgagcccaagtccaagcaagacggaggcaagaataacaagactgtaaagagcgatgctaaaaagaaggctacccatggggtgaagaaagaggtcaaaagcaaggtcaagcaagggatcaagaaagacagcaagacggctaagcctccaaaggcaagcggcaacaggtctatcaaggagtcgaaaggaaaggagaaagtcaaaaagagtatggcgtctacgaagtcagagtctcgaagtgtctccaagaggcaagagatgaagagcaagacaacaaagacaaagactaccactactaaggctggggagaagacggagaagaagaccgaggaggagactgaagaggatacggaagatgagactgaagaggagaccgaggatgagactgaagaggagactgaggttgatgatgaggatgagagtgaggatgagagtggggaagagactgaggatgagagtggggatgagagtgaggatgagagtggggatgagagtgaagataagactgagagtgaggagaagtccagcggtgagttatcaggccataaaagattgtcagacgttaaaaaggaatcaactggcgacaacgacgacgcagatggcttcaaggaggatggtgactctgatttttcaaatccgaacgccaagagaaaggagcaatcagcagatcccaaagaccctgaggacccacccaatgcctcaaagggttctaatgaggagcaatcctccaaggccgacaatctggacaccactaagaagaatgctgtcgatgacgacgatgcagccgccaacaagacttcgactgcggatggaccatcagatacgcagctatcttcaattaccaaggaccaagccgaggagaattcaaagtctcaagagtcttccaccgagaacggatcttgcgatgccaaggaggcttcatctgaagaagaagccgcaacatccaccgccagcaagagtgaagatacaagatccaccactgtcaaaccccaagacaacactgtcacgtcaaccagttatgaggcttccaccaaggagaccctttctaccagcaatgaagtagtgacgaccggcgagcctccgaccacgtctcagcgatcagtccctgacagctccgctaccgtggatcagaggatcagtgaaccgacaaaagctggcaagtcatccggttctgccgttctagctggagctgcggtaactggtgctgcggtaatagctggtgcagtcatttacaataacatcacaaacaacagttcaaccaccataaacattgatcagtcttcgcacaaccaccaaattgaagctgctcaacaaggagagggagacactgatagtgataacaacgatcaacactctgtacaaggagctcaagacagtgatgttgagcagcatgatggtgataattcgaaaggtgaaaacgatcaactcagcggcaacgacactgatagcgatgacggaggtgggaatgacaccgacagcaatagcggagaacataacgcaaacgactcagacaacgatgaagaggttgacaatgggagccaagccggcttcgacacccaaagcgtcgatgggtcccaacagggagagcacgacagcgacgacaattataaccaccacgaaagcgacgacggtagtgacaatgagggtgacagcgaaggtaatatcgaatcgggaggagatggagagagtgataacgagggaaacatggcaggcgaggaaggaagtttcaaaggttatgcctccagtgatgatgggcaccgaaagttggatgatgaaggtggctccaacgatggcgatggggacgaaaatgaagacgattctcagaggtcgagtgtttctggggatgatgatgacaaccagagccacaatggatggggaaatcaagatagcgacgaagagcagaacaatggaagtgatgcggatggcaatggtgaagaaaacggatggggagatgacacacagagccaagtcagtggtgatggtgacgatgatgacaatgacgcccagagtgtcagcgggcagagctctggaggcggctctaaccacaccggaacggctaatagcaaggatggaaacggggatggagatgacgatgaggatggatacgggtatcacaatgacagtggagatgaacccgctggagatggtgatgaccgaagtctgaaccaagatagcgatgccttgcaggatgatgacaatgagctggacgatgacaatgagctggacgatgacaatgagctggacgacgataatgagcaggacgacgataatgatcaggacgacgataatgagcaggacgatgataatgagcaggatgacgataatgaacaggatgatgaagcggaggatgatgaagcggaggatgatggagttgaggatgatggatttgaggatgatggagttgaggatgagtacgggcaggataaggacgatgagcaagacgatgagaattatgaatatgggcaaaatgaggagtacgggcaggactatgacgatgggcaagatggtgatggcaacggatatgaagaagactatatgtactagtagtatcagttggagagaattaggtaggtaggtaggcaacgcatttcgtgcaaaacatttcgggtctccttacaagtattgaagagtgcaatgtgcggtcttgcgtttgaaagagttccaatgggtcagtggccgatgccacctttgagagatctggtgcttggagcccactcctccaggctcctcggaattttatcctcagaccgtcacgatgcaccattttttttttatctcactgcatgttgaagtaagcatgaacagtccttggtggtttgggaaatccgccctaatcagatgattggttggtttccggaccggcgacctagcgctttcctcccccggcagaccttgatcatgaacggtgaaccaacaaattggcacctagcttctttaggtatcaacacattgaaagagggcacatgatattgcaattgagtcacagaagacgagaaaatgtggcttcgtctggttcgttgaggtaggaatatagtgtttaggtaggggtaggtcaatacatgtaccttatattcaatgatctttccactgttctcttactctgactctggaccccagtcttttggttcatcacttctttctttcttttacatggtatcaaaaggtcctcagtgtttcaatggcgcacacaagcagtcataaaaatactcaaattcaaaaaggagccaagtcggttacctcgaataccaaccctgacctgaaagccgactggttgagctgcccacttgccccaaaaagcgtcacacccaaaacttctggaacaaaggtctcatctcagtcgaaaccaaccccaaagccaaaagacccacactatctcatcaagcgttacatgaaggacggcgtggttcatattcatgagaaattgtggatggaagcaagatatttgccacaagagcctggggcattccacggagaattagaggtgcttgaatatctgccatttatcagtcctgtttcccgtcctttcctttgtttctttattagtttgtttggagaaacagtcttgttgacgcttctattgtgcaggaaacggactttgatatttgtattctggctgagtttgcgggtcaagttcatgaatctgtgatgatcgggtcttatgactctgctcctcacctctcatatctatgatgcgaatgatgggcttgggagctcgtaccaccagggcaaggtgctggccaggatagaattatatcagaattaagtacccagacagtcatcatattcatgaattcaatagttcattcaacagtaggcagtgaaaagaacgccttttcttgaagtcatgtctgactggttttagaggttatgaaagagcgtgataatgtcctctctgatgcatgaaatctcctaaagagtgtttccagttggtgtttggtcttttacccttggtcccacaactacaatcaccaaacccctttctcattcccctggacctgcatcctattcaacgtacgctgtgtccacctcaccagccccaccagtgagtcctttgtaaccttgacaatccaacgaagaatcatatgttggtaaggctcgccgcggtattcgcgtccgaactccagcaacagtgttttgactcctctagggtcatccttatctccttcagccacaattgcgtcgatctcccggaatcccagagacatgaacagacactgggacatgggcgcagcgctgacacactgagggatcctgtccattcttgagaggtctctagcccatgttgccagctgagtgccgtggccacgtctccagtatgccgggtgaacgactatcatgctgatggtggagtgtctgtggactctgtttttccttttggcggtagcagagagaaggccccactcgtcatagtggcgttggtttaagtctcgattcaggctatgtggagttgcgagataacgacctgggagacgtgatggttaatatgaggttcacataaatgcaatttgagcttcaatagaagtatatagatatttggatgtggccacagtgatttgtaaccatagacgaaaattcctgttgagattttgagataggaggagttaaagaggcaatgaatgcaataaaagcagtgacgttaccattattgcttttcaatttaccaacatgaggagagcctgggtcgagtttaatggaaataacaccgacaatgacccgttcaccagccttgggagcagtccaaccggtgttgtccggtatgatggcagctgtcttgttgttttcatcgcgcaagtaagcgtcctcccggactaagactatatgatcgtcgctctggatggcatccaggaattgggcgcggtacgactcgagtgtgtcttcggggtactttgcatgattgggacgttcccactcgaacagaggagagtatcgaaaagcggcagttgccacgacgctaatgcgaggaacatcgtcggggcttgcgatacgcaggtggcccagcggagggaaatccatgcggcaaacaatgtcaaatgatcgtgaaaaacatgaaaaagagaaaaataaactggtgggttcccatcttgttacaaattaactgtctttgtgtgcacttatgaagaaattccttgtcaaggattaccattccaccagatacaaactttggggacacaataggtaataatggcgaggctccggtcgatgaagtgggtggaggtgggttgaggttgaggtccgggtgggttgaggttcgtatacagtgttgcaccgtgcgagcctcgcgggacccacaagtcaacaaatgccaggtgcttattctgggggccaatcagagtcaatcagagctcgaccggcgaaggagctaccccgcccagacgcttttattggcgagcttttctcacacatcatggtctgacaatgtttagttcggcccttgatgctggaagtgtttatagatactacatgtaccagtttcttattgcgtttaagcctcccacgggcacgtcacgtttcacagttgccaacttctgatccttacattacctgttcacaaattccaaaaccatgtccggccacggagagggtcacgccggcccagaaacaaacgaatcagaccccggcttggcgccatcagaatgtttcgactccatgttcgactttgagcagtgggaggcagatcaagaggttcactgggagttgcatcaggaccttcaaggcctttcaaatctcgcaagtagtggcgacgagggtctcaacatcacctcgctcacacctcagtcttcgtccatcgatttcgatttggaggaacccctgcgaactactacacccgtgtcaacgatagttcctacaacagtgtcggccaacatcgaaagtttgtcatgccttggcgttccatcatgggacttcgtttcgataaccgaccataattctatctctttgccatcgacccatcttgttcactcccctgacatagcctctggaactgatggggccgaagtacccttgaggcagcagtcgctcccaagcggttactcaggagactatagcaaccaaacaaccggggatcacaatgccttctccaaagacccgtcagtggaaagacagagcgatgttggggttggggttggttcttatgtcatccaacccaaacaaagcctgccacactcgaagaaaggttcccggacaaagtcacgccgcactatctcaacaaagtcaacccagttgacgacagagaatgtgacatcctatgactgttccataggttttaggagcatcctgcccagactcgacgctcaagggacaccttgcaaccacactgaaccagacgcccaagcttccagttcgatgccatctaaaaagaagcgcaagcccaacacagacgaagaccgcgagaagatcaagcttgtgaggaggggtggtgcatgcttacgatgtaggatcttcaaagaagccgtgagttgcactatgagtcgatgccagatacgtgctaacatcggtgatagtgtgatcaaaacaagccttgcgggcgatgtttaatagctcttgccaacgctaaagttttttcattaccatgttatagagagccactggaaaacgtcattgcatttcgggctggaaattccagggccggaaaaattcgctcggagccaatatctattagatgggccggtgatgacataagtccgagagtcgtagcgctgtcatatccgttcaagaaacagggcgctggagcaggattaacagtcaccattaaatgtcgcaagttcgtaccttacgagtgggatgtgatggaagaaccatggtctatttctccaacaaagtccattcctatgatatcaacaccatttgcctgtgtaagtgcattagagatccggttatttgtcatcgctgactgactgaaactccagtacgacgatggtgcaagcgtggctgctgttgcaaggtacattgaagccaccaaggcagcactcttggatgagagtctcgacggtattttggacgacatgattcgactgagtactgctgaagcaacacgttactgcttgaaatacagggtgagcgcttccagtgagcttctcaggaaactgtgatcatcggctaatattggcggtgacaggactctgctgtagcaactgccatgaacatccgcgcagccagctttttctcccgaacgaaaatgatcatgactggaaacaatgtgcttgaattgccttattttcataatccacattttctactcaacggtggctaccctgtaccatcaatgattgactatcagatggattacatggcaattacctacatgcacagacagatggaagtccttgtaaagcagttgaagaagctaattttcaccaaaaaccagcgtaaaagctggtacgaggtctacttgacagtattcgtgctgcttcaaagtttggagacagtgcatgctcgccaaatagacatcattcggcggtatgaaccagaggtacggacgaatcttacaaaccttgcaggaatctcactaatggtgatgatcagggtggtgaggcattgtcaaaagctcgaaatattggcacgagaatgatcgatgaatggaaatactctgcaagaatcctgatttatcattatcgagctgttttgaaaggcatggtgccattcgcagccacctggaacgacaaacacgtggccgagttgcgccacaactgcggcctggatgaggaggcgcttcaatatgctcgacaaatgtcgggtttcatcaggacccgattcgactctctcagacgattgaccaaagaggggctcgataacgatgctgtaaggccgttggcgtggatagcacgactttatatcgacgatgaggttgactcaggcaagaagtagagaggggcgttcaatttcagcaaacacagctatagtatacctgttgttatctcctccgagccaagacattgcaaaaacgagtttcaagctccgcttgcaccagacgagtctttcgttcaggcggcactaggaaccggcaaagaaccttcgacaaaccagcaaaatccaccgtcaacctttcactggcccagacggcaccattgttacaccaacactcacgcgctgcacagccacaccagaactcagtcatggtccgggttagcagagatgcccatctgcttgatcctcatgccaggagcaaccttgtccatctcatccttggtccagtacgccttctcagcagcattcagatcaaacgtctcgtccaacttcctctgcaagacaggagcggactcccatcccttgtggctgtcatgcagccacaggcgcatgatgtaccgctggttccacacatcatccggcgagtcaacaaacccagcacgtgcatggagaacagcaaagttgttgatgaacaacaaatctccagcctcgggaacaatccgaaggttgacacgcgtagcggcctcctggacccgattaagagcagcaatcctctcgggtgtaagctgtggagcatcaggcgagaaagggatggcgggattcgcccccaagaacgtaacagccatattgatctgaagctggttgttgtggaacccaatcacgggcctgttgaaggtcctggtgatggtttgatttgggccggggcggtggatgcgctcccagtaccaattctccgagagaatgcgcaagacttcggggtctcgcttcatgaggtcgttgtaaattgaggcgatgggggcgagatactggtctcctccttcgaggggagtgctttggacgaagagagagaccatgtcaccgacgtcgatgtcggtgtgaaatgtcatgggcttggcgagctcgagggggctgagcttttgcgagagttgggcacgggagcggtcacggatgtggtcttgggaaaagtttagcttttgctttcagtctctaaagcaggaagtctcaccaatgtttcttgcacgctgatcagcaatgtagctggtgatgccggcgtagaggatcacacattcctcgtctgtgtaagccgaggggttgatgccacggatacggtggaatcctcggccgttgtacacatggtccgtgactttctggagccgtttggcgagtccctgagaaagagggaatgtggtagggtctgcatggccacgggaaaggcccagggctggtgggcaagtgtcagttgatgacgtgggctgcatatgagggacacatgtgttaccttggaagtgtttgatggcagagttgagctcctcaatatcttggcttgagagcttgtcagtgaaaacatcagtgttggactcaaagtcggcaccagtccatgccaggtcaccggtgagctctttaggccagtcagcggagctagggctgtccattgttcaggatcttgtctgagtcgtgcaatttctcccttggaagttcaagtatgatgagattggggagagagtagtgtgtacagaacttgattttcaagacccccattctcaccgggactccagtctgcatatatatccttcatccattgcatccagctcatgaacgtgaatgccctcgatgcggctcaactgcgtatttcccctattccacaaggctatgaggctcaaatcgaggctctgagctaactgccgggccaagaagaagcttcaggggtgtagcttatgtgaacacatgcagagcggttggggtggtgtgctaaccgagcgtgccatttgttgccagaccaagaatgaagcagaagtgcaacaataagtctctcacactgtgcagagatgataagcagagcctcaagccagcgggacacagcatccgaaacagtctaagttcggggcggaagactgtcagcgtgaccacggactgagccggttccgcgtggagagccaatgatcgagggttgtgatgaagagaatgggctgttgatatataaaacccccacgataacattctggcttgcatggtaggatactatgtcacggatccaatggcttcagagtgatacacataggtaggatggggagtaagcacgggttaggtaatgacattctggaccttgttttcaatgaggctcttcgcacgcgctagcccgtaatgatgagtggaaggaggggataaataaaatgaatggaatcagttgagtgcccaaagaaggaaactcggcgagatgggagtcgttgactcttgccactgtgttcaccgtctgtggttgatccagcaaatgacctcctcggcagccccaattggttggtttccaatgatgtcaagactcgagacaagatgatgaactgctcctgattcaactctggaccagtcatacagggctagccgccttcaccatccagcaaatggaacggatgttaccgtgtctaggcagttaggtatccgaggacacctccaccagccgataaacgtcggtatacaccggtctagagtgctatatcccagattctatgtacatgcttccccccctaattatgttaaaccgactgtgtcacacagcttctgagtacccatcaggcccttagagccgatcaggtgttaggatctgcttcactcgttcaccagaacaggcaatcatttccagaactacaaagtcttggtaattttgtgacacataaactgtctttctacgaggatggcatctccggtttctgctctagatagcttgttatcacaggcgtaaaggctttcgtcaaatcatcaaacagccgagcatatgtgactacggatcgtgtcattttgaccgcattcggccctcaagcgtagcgagaccgtctatgtttggctgaacagcttgacataggtatgactaaaggaatttcagggcgtaggctctcatcaaactcgtctttcaattccgtttcttttgcctagttctcgatgcttacctatatgttcagcctcctcaccagctctatatccgattcccgccgctgaagcccactcccacccctatcatatatggacgttgtcactgggccgtacccctccactttcttccgcaaaaagccgagccagacgaaagataaaagtatcagtcccacagcgacaatagccatacccagtgacacacccacaaccccaccaagtggcatctctaacctgaagcctacgaagctcagaccaatgaagagacctgagagaacggtgaatatcaagagcatatagatcgtgctggcagtggtgagggctgtcatgaactttatgagacggttgccaacccgcccgatggaaggccagttgatgctgcgagcgattgtgctcgggatggtgtgggtgacagcggtctggacggtggagaagtatagcgcaaggtatgtgacagcggtgacgcctatggacactcccagccatcgtggccaggtgtattggtcttgaaattcctaccaagatgtgtgagttatgaacaagggaaataagttaaggcacttacaattacgttcatcccaaaaacagcagcaatgaagctcagtggtataaagaagaaggccagctgtgtaagcttcgatatcgactcggcttgggcgatggcccgctggctctctaaaatgctgagggtcgacataagcgcttgaaaagccgtttcgactctatttcgaatcgcctcgagttcagcgttgatctggttgagtcgccatgctatcacttgctccgagtcatcgccgtatggcgggaccaactgacggggcctctccttggtgtgctgctcaagtttctccatcatataccggacagagacccgaaggttggcgagggtgttccgccatcggccaagataatctctccactgcggcaccgaggagcgcagctgctcgtcttcgcccaaatacaattcgacctcgtccaacccccgacccagctcgaacaggatggttggcatatcatccaccacaaaaccaagcatcgtttgtatgagccaagtatcgttttgtcttcctcgaaacggactcggggcatccagcgcccttttgatacggtctagggctgtcgtctcgaggataaaacagggctgattcggcagaggtttggagcctatgtctccagaccacaagttgaggttcacctgcctgactgtatgcattctttgtggatcgaccagaaggcacccaacaagttgaccattctcccgtctcgagtaatgaaacgacatgcgcgttgaggcatgatgaagaacaacactctccatcctctgtgatgggtgaagcggatggtatggtctatataccccctccggaaacgttccccatcgacaatggctctcgtatgtggattgggggtcggcagtttggtctgtatcccatggcgttcccgcgcgaatcttcttctccattttccaaccttcagacttttgcagggctggttctgaccagctgacaaagaaactaccggtagatctgtcctggtggaagcccattttgtgtcctgagccgcgtccaagatgggctgggaagaactctgggggcaggtacaaccccatatttgccaaacgcgttgcctgaaggtcgctatgagcttccacgaggtatatcagatcgtaatcttgagagggttccagggcttcgtcagggttgggtttggtctgtgacaagtcgacggcggtgaaactggtctttccatcattttggacttgaagtcgcagacatctggaggtggcttccgaaggttctgagggtttggcgggctcccggccgataacgggatcacccagcaatctcaccgagtcaagcgacgaggtccttcttttgagcattctgacttaattgatgcttcctggatttcagacattaaggatcatgggaacttgctttgtgataaatgcggctgacctctattgccccttgatactctcccctgtcccacgactgttctcagccgcacgcggggtcgttcgtgctcatggagatcatcttcaaactgttggcacgcctctccgggcgaagacaataatgtttgtggagaacactcccgtctttcctacgatttcctcggttgccgtctgacgggattaggattcaatgtgatacccgtgggtacatggcaaagcgtaagttgggactggcgggccgttcaacgtgccttcaagatttggcatgcacacccctaacccttggccaacgaagtgtggctggaagtggtccgcgcaccagcacttcagcgcgtgtctgccttcttctcaagctgggataagtgtttatccaccaaatgtccccaactatcgccgggcacgataacgtcttgggccccaattggtttctttctgtcgacaagtcacatgaggggtctctggggcaatagtattggatcgccttacacaccaccacttgctggcaggatgccttgaccacttcatgtggtgctaggtaaggcaatcagcccttccctagggttcatatgactcggggattatcatggatttgaataagatatatcctcacacttcccttggccggcgcacgcggaatactgactctttttttgttctaaagaagcattacaccgcatgcgatctgtttggccgcttccctttcaagtccattgatgctggggatcatggcatcacagccctcttgttggggcatattccccacaccagccaacaatgagctcaccagacacactatctaccatgatcttaacccagcctgccaggaaatccgcctgctcagagttcatcttgaggaaaaagacggctttatccggtgtgagctcctaccagcagctagtctgtccaacatcagagggcagtacacggcaatatcctactgcgcgggagaccctaggagaaccaaaaaaatattcgtcaacggcatgccgttcaatgtctttgagaatcttgcccatgtcttggaaatgacaaggaacttctggaccaagacatttcccgataaagagtgcataatctgggccgaccaaatctgcattaaccagttcaaccttgctgagcgctcacaccaggtcggtttcatgaagggtatttactcttcagcggcggagaccttgatatgcctttccaccaccgacgttgaccctcgtggagttgagtggctggtgaagctacaccaaagtgtcgatcctgatggcgacttctaccagtactacttccaccttgagtactacctccgaaccaacctggccaacaagcaatttgccgacgattggtttgcattttacgacgtcttcaacagcccatggtggatgcgaacttgggtctatcaagagtttatttcatcctccaacatctattttttgtatggaaaatcatctgttccctggaaaagactgtcagaggtactcccgacacttcaaaaatacagccacttcccatactttggcccggctattactgaacgccaagcacaagtcgcagacacaaagaacattgtcaactttttcgtaatcagtaaacttcggtttgatcgggttgggccattcgacttgatggatctgctttctcaatctcgacatcttcagagcagcgatagccgcgacgggatctatgctttccttggtcttgttcgtgagacctacgggatcattccagactattcccctgagaacactatggaacggcttttggtggatattgcaacgcggattgtcttgcaagacaaaacattggatattctctcagatgcgagcagggtgagaggagagctgtcgccacgacttccctcttgggttccagattggaccacaaagacttgtgtcagccttattccaagaaccatccgagatacaagtgacggatcagtcgctttatttcctcgaatcgttcaatcagggaagctagaacttcaaggtttccatatcggtgttttcagaaatggaaagcttgggtggtacttccccaacagtcgggacagatgtcgtcatgatggtgaaggtcgcgaggagttgtgggatattgtcggggctcaaggtccatttgttttgcgtcacgtggggaatcagtatcattttgtcagggaagcacagagaaataaacctgctggatataatagcgtggaggatgctgttcagagacatggattgcaagcgcagacagtggtactctcttaagatacttagtttctgttgcctttgttgtttatcactgtcaggttaggtaccagacctagcacctactgtattcttcgccgggaatattgatatcacaccagcgtcacaggaaccaagtacccctgccacctgttccccaacggtgcgaagaacaagcaaggcctgcgaaagagctggcacattcatattggaacactccaagtcttgtaccacttcccttctttaaggcagactatgcaaactactatatcccttttggtaatgaactgtagcccgggtagtttcctccggctacgacgttgtattgtggctgtatgatagcattttatagacttatagcgattggcagctgagatacgaatgcaacctaggtacctagcttaatgtaactctgatacccttctttatttacctctgcacctttgcactctaccctgccactccagagccggcttgatgcaattgcgctcggcatgctgcctgaatcgggcctttgaaatgccttgaagttgttagactggaagttgtgatgacatggtacccagttgataggcattaatatctcatagtcaacgatatctattccatgcacgatgttctaatcaccagaataaaggagactgatcagcctattccaaccctaggtattccctcattcatcagtctccaggggattatcacaacaacatttgcccttggaaggtcatcctctaagcgcaagcaagatatgaggacccgcgcctatgcattgctcagcagcatgttcacgaccaaacttcgagttaggacgaacgttgcagcatgctacaaacccatacctctcaggactggattcttggttatcatggcactgtagtacgttcactccctgactgaatttacctatcttacagctgacaacgactgggaagtatctgctgtcttctcgctctcgtggaaacagctcttcaaaagttttccatctctcatgatcgacgaaccgtgcccaatgacaccgtctctttcgggtacgggtcttttgtcagcgctccgcttatcccgccgcgacaaacaacgcgtgccatatatgctctaccagatctacaaccaagatggacacctgcaaaaggattaagagccgccaacaccacggtcaatggtacagtccccaacccctcaacaatcgcacccagttcagcatctccggtcgtcaacccaacacctacagagtcaggtccaccagcctggctggaggcactagaagggccatttcgatctgctgggcggagcgcctacttttgggatgaaagtttgtcgtcaggaaacggtacgaaagaaatctttacagaaaggagccaactcaatggtcgagcacccattccacccctcgacaactggggccggctactgggcccacgtcacagctttcgctttttggttacggcaggggactatatcagccccgatgcaagctcttttcgtaaccttctggccatatggcacgaccccttggactcccaagctagccttgcagtcttgagacgtgatctaggcctgattgacgagacatacgaaaccccaggaaaggacgagccagactacctcaggaattcccctcagtcctgcacagtggtgtgcagtgggtcagcacttatctttttggaccagacttgttggttgtcgtggtatatcacctcattgatgtggacttatacctgtacagacactgtgcagttccaaaacacgcattgttttagcttggttgcagacttcaacaatggacacaaagatcagccatgcagcagtccggatcccagtggtttggaaggagatgaagcgcagagcttagtatttgagtcaaatcgtcatgaagaacaagacaacaagagcagtactgcttctgatacagtccaaagaacaacctttgcatcatcgatgacctcttcatcctctgcagcttttacatcatcggtagcctttttatcgtcaccagctttttcatcgtcaataagctttccgtcgtcaacaactttttcatcaacaaccttttcatcatcaccagctgtttcatcatcatcagcagcattgctgacctttcagccgcccatgacaatcatcaccagcattactcatagcggtttcaaccatggctccttcagcacattgaccgaaagtaatagtcaaaccgacaacacggttagccagcccacaatacaaacatcgacttcatcaccagacaagaatagcattaagccgtcaaaatctcaaccagaggagttcgcagacattggtagtggccatattggtacaaccgtggaaagcaaaggtgcaagtaggatcaaccccgatagcataacatcgaccagtcgcagtctcgaggcaagcgaccagtcaacaactccctctaagagtttcacggccactgcctctacttcccaggtcacacaagaatcaggggttcgggatagcctttcaaggattagcgaaacaaaacaaacaacaacaccacacttcaatgcgtcccaaattacgacgccaacaaccctatacgctgactctataccgataacattattgcacataaaaagcttatcatatccagatgcgacacaattccgacaattggttgggtctcaatcaagtcaaaaacgtcatgataagacaatcagcggtgcttggcaatcaacaacatttcctagcatggagaaacccaatagtgcaggccaatcaccagtttcagacacgaaaacgaggcccccagccgtcacactgcccaaagagcctaatatgagcgataggtcaatccgctctttagttgtcacaacagaagcttctcacagtcttgattttctcgaggacgtcgccagcctagctctggcacaaaaggcgacagtcagccaacttacaggctcggtgaatggaacaaggataatcactgcattacagtcgtacaaagaagccatcaatctgtccacaacgacttcttttcctacggatgccaggactttggccgcgatagccatccctacttccgtcacagacctacattcttcgccatcgacaagtcataacccaacagaaacggtcagttcggtgataggcggagcacaaataccgcctctttttcaccctgtttcattgggagactatttcctagctgcatacgtgcctgtaatgatcacgttgcccttggcagctttggcacaaatattgagcatggaggtcaaagcacttgcccccttccacgcactcagtagaccgatgggggcggcagctacagactccctgtgcctccccacaggtggctttccggggatctataaaagcatttgcctttgcttccggcgtcaaggtcgacagcccttattatttctggtcgatctgcttgtctggaccacggccatcattgcctcgctctctagcgaggccttcggcatcaagctccatggcaaatgcaaacacgacgatttcagaggatgctacatgggaattgcagtatacggcactcaaagccgcatcattcagagtctactgggcttcgccttatgtcttattctgcttattatgtatcggctccgaaactggcaaaccggcattgatgtgccccatggtcgaagtgtcgcagccatatctatgctcgttactgaaccatgcacacgcagagtcttgcagcacctcaggcccgattcccacaccgggagactcagtaacaaggacatggcacgccagcttgaagggtacatctttaaattagcacccatctcatcacacctgactggttacaagcagcttgtttcctcaaggcccgcacaagcattacgcgaacccaaaccacaaaagacaccaaccacacgccgctccagaatcacggaattcgttgaccaccttccacaaggctttctccttcaattcctcgtcatcctcggtacactcagctttataattctgataatatgctatgaaacaattacgggagccgattctccgtttgagcacttcatgaactctcagggcttcggtgtgaagctcctttctgcaggactgggtgtagtgatatctctcttttgggatgattatttcgcgcgtgagttgtctctgacatttctaacccagcagttgaacccaagctaacccgtcatcccgacaaacaagaggttgcactcaaagagccagaccgccaattcaaccgctggccgcgccctgccaaagcctcttccgttttcctagtctccccaccgaccactgcctttgccgccctcactcctgctacccttcacagacgccagttctttctcatgtgggttgcctttgtcaccgttctgtcaaagatcacgccattgttgctatccaacatcccattcagcccctggctcacctgggagaacacatcgtgtctgtacttggaccgcggttgggatcttgacaacaatgatcctcacattggggtacggtcttatacttgtcaagtactcccgatggccgtcgcatccaggaagactcggtggcatcatctactacctgttgacaatgccgtctaacagcaacggaagaacaccgattttgcggtttcttgatgatggaatggcaccaggaaaccgtgtggaggatattgaacttggaaatatccaacgtcgttgaagctacaagctacctatactgtatcctagaaacaatccaactcatcatgatggacattacccagacttcctcggagtaacatcaactcccactaaatcaccagccctatactcttcaagaaccttcataaaggacaagatgccctccgaccaaatacccatcctagcactcttcatcatctcggcaggatcctgatttggcttgttgaactcgccctccgaagtggtataacctggcgtgcacacgctaagtgcagcaagattggcagctcgcttgacggcttccatcgcccagccctcttcagcctctactgtcgggtcaatcacggcgagccccccaaccttttcctcggccttcttgatgaagtgagtcatgtgttcagccgcaatatccaacgtctcagtgttgttaggagactgcccaaactgagcagtcggcccaaagaaaaggttaggaaacccgcggctgataacaccatggagagtcgaagctccctgagcatcccacttgtcgtcgaacgactttccaccacgaccaaaaacattgattcccgtccgtttcgcagggttgagaccaccatacgcaggagaccgatacccagtgctgagaacgaggatgtcgagcggatactccttcccttgcacgaccagccctgtgctagtagcagagtcgataccctttccgtctgtgtcaaccaagtgaacgtgagggaggttgaatgcctgcaggtactcatcactgaaagttggacgcttgcaccaaacagggtaccaaggcttgagcgcctttgctgtctccgggtccttgacgatctcatcaatgcgagcacgagccttttcagcacgtggcaggtccaacatcaagaggcccccaacatgctcgccaatcttctctggagtaggctcgatgatcccaaagttgggagagccaatgatagcacaataggcaggcgcctcggtccatccacaacccaccatgttgacttgctccgggggtgcgcagttgttaaggtaagtgacccagttatagcggcgctcgcgttgccatccttttttgttggcgatctttgttttcctttgtaactgttagcccgagttcgaagtctcccccaacaagatcaaagagctgtacttaccattcctcaagatccgtttccttctggccacgccaactcaccgacgaaggcgtccgctggaaaacatacacctccttcgcaaactttgccagcttcggcacaacctgaatagccgtcgcaccagtcccgataatccccacccttttcccttccaagccggtcaaattctggtcctcctgcgagccacccgtagtcccataatcccagcgagatgtatggaacatcgaccccccaaggttctccagtcctggtaccttgggaacatgaggaatcgtcaaaatacccgacaaaacaaagaaataattcgcctggatattcagcttcctttctccctcctctggccccctgttttccgtcacagccacattccacacctcctcctcatcactccacctgcaatccgtcacctccgacctgaaaagcgccttgtcatggagatcccactttgtggcaatcctctcagcatgctcacgcagctcaagtcccgtagcgtatttttgcttaggaacataccccgtctcttccaacagcggcatgtagatataactttccacatcacagtgcagaccaggatagcggttccaataccaagtaccaccatatccaccaccagcctcaatgatacggaggtcatcaggaccgttgacgagaccagcttcgataagcttgacagcggcgatgagaccgccgtagccgcctcccaggatgacgaatttgtacctcccgccatccttgacagcgggggttttggcgttgagagctgcgtggtcgacccagggatctttgcctagggaatggatgcgggcgtccttggcgtcctggaggtcgacgtactgggcgaggccgtctgagcggaagcgtttggaggcttcttcagtgtatttttgttggatgctggcgaacttggcttgcatggctgccatgtcggggggggctccgtcggagccattggtgctgtcagcactggggaggacctctgaggtcgtcatggtgtgaggtttgaagagttatctttgtcaaccaggactgaagatacagataacggaaaccaaagagagaggaacggatggcttacgagttccaaaacaggatgtcgtgcaaaacttttacttatgtgtctccccctgggaagccctgggtgcgagtacgagcagtttatataccagaacgagtacgatcgcgagaatggtaggacgggatcgggttgcctggtggtgtgtctcgcggtgctcacagtgtgtggagagtgtgtgggttctgggcctaccggctgcaggggcgttattgatcccatattgaaggtcttggcgggattgcgaaaccaggaaaagacaggtcggccatgtcgcattgcatactgtacattcctcctgttgttgcaacgcacattgccaacgccctgagtctcggggtttagcagctgtccgatcccaagattaaccgcgctctcccgggcaggatgaaacagaacctgccatcttcttcagcgtccggcatcaatccgaagcaatcatctgctgggggtccaagacaactcaccgctcatggacttgtcatgtctcaagccgttccttcacattcttcagttgcccctccatagatcgccatcccgctccgtgcaagcgccaatcattggccgtttgggatatagggttacagacaaggttcttacgcgagcccctatgtcgataaacgcacaggtcacagtgcggggtggatgggccgtgtacatactgcatcattatttgtgtactccgtaggtagtttgatgactcttgtccaatcgtcagataccaagaggagagtgaggggtcaaaaatgcagatatcgacagtctcagccgtcgaaccccccgaaggcacacaggagctgataaggtcatactcccaacaagggtttctacaagttgcgtaatgcatcatgctaaactcttggtgtccacggaagttaacaaatcaccaacagctcagcagggaaccaaagtccccaaggtgccaaccgcatcaagcgatggaacacacatataacttgctcaaccttccccccttcaccatcatgacccctcttgtcttgttatcgaacagggtcgacctgcataaacaatacaccaataagaaccaacaactaaaaagccaccaacatgcctaccgacccaagctctgtcccaaactttgacgacctccccgcagtcgatggacaccctcagggctgcgcctggggagtcttcgacaaggacggaaagaaagaccactacggtacactgaactttgtcactcctgaaatcgtagctgctgctgccaaagaagtcacagatggcatttccatctctctcaagtatgtgtgcggattctccacgcaaaataggcactaacaaccccaaagctggcccctaaacggcatcaagttccccttgcccggccgcaaagcccccgtccacaaacccgtttccctccgcgaggcagggatggaaatcgatggctttgacgacgagctcgaaatcaacacccaattctcctcccaatgggactccctctgccactgtgtcctcccctcgggcgagacctacaacgggttcaagccctctattgagctccttcaaacaaccaccactgagggcaacgaaatgcccactattgatcactggcactcccccgccaagggctgcctcgttgcccgtggcgtcttgattgactttaagcgctatattgatgagatcactgacaagacgtatgaccccctcgatggtcataggatcaccgttgaggagatcgaagcggtggcgaagcatcaaggggtggagatcaagccaggggatgtcctgattgttcggacggggtatacagagtttttggagaatccaactccggaagggtttgccaagatggctacaatgtcgctttctggcgtgcatggcacgactgagacggcgaagtggttctggaataagaggattgcggctgttgcttcggatgcgcatgcttttgaggcgctgccgccattgaaagagaatggggaggttggtgctgtgtcggatttgggtgagttctttgccagctttttgaacacaaaacgaatgggtttgctgacagagaacagtgctgcacaagtggtttttgaactactttggaacacccattggtgagctttgggatttgaaggcgctgggagagtatgccaagaagaagggcaggtacagctttttgctgacaagcgcaccgttgaatcatcctggactggtggcttcaccacccaacgccattgccttgttctgagctgcttccaaatttgtcaggattcaaaataaagaataagaaggaaaagccaaaccaaagctggctcacactgtcaggttatggacaaataaaatagaccggaatgtgatgaaaaagggttaaacagccttcgattacccatattgcctgactatctctgttcacctcacgatacacggatagtacgataaggtcgtcatagtggctggctgttaattcctgggatcgagtggcaacatctaaaactaatatgatagaatttcaaataataggtaatggacagggaagttcgttagttggaatccagactttgaacactgtgagtttcaactttgaacgccgtttcctactagtttgaagcctcgaaccgattttcaacgtgtccgaagccgcaattcccggagccacaactccacccgcctcatcggcgctccggctccctcctcaacctcaccgccggtaccaccgtctctcacaaattcaccacttaaccaccccaaaccttacaaacaccaccacccctcaaaatgtcaacctacacccacccctccgacccctccaccctctcccacgtccaatcaacatgggactttatccgccccaactcgtccatctacaaccacctcctctccgacatccgcctcgtcgccgccacaaaggggcgcatcatcgcccacctagacgtcacacccatccacaccaactccaaaaacatcctccacggggcagtaagcgggacgctgtgtgactgggccgggggtatggcgattgctgccgagacggggctgcaaaagacgggcgtgagcacggatatgcatgttagttattgctcgacggccaaggtgggagatacgttggagattgaggcttgggtgggcagggcggggaagaacttggggtttacggggtttgagattaggaggggggtgacaaatggagaggggaagaagggggttgtggtggctatggggagtcataccaagtttctattgtttgggcaggggaagagtgagataaaagaggaaaagagggaggggacggttgaagggaatgggtccgagtaggggattggggcgagggcaaccctgaagacatagacttatagacagttacatggttgacaaaatgatagaggcagccgctggggatgaacatgcaagccagcatgactctaagaatagtttatagatgttgaatgtatacttgtggcacttaaagatacggtagccaatagacctttaaagatggttcatatgcctttcaagatgaggtcatttatgtctttgaaatagttgaacggtcttcgaaatatagtcgaaggcgtttcttttagctttcaagaccttgaatctacgttacagagaagataagccccgcctaaagtttaacaacattgctggtggtggttcccaatcagagtccctaaaggcaaacccacgctcatgcctgccaccatggaagtgctggtacggtgccttctcaaaatatggcggggttgatgccaaacggatgaagcagaaaccatcgcaaatcatcagaagaggcccgtgaaagagctcgaggtggggtgtaagggtcacttaccaaacttgaaaatttagtcccgctccttatctacctagctagcttcattccgccattcttcttttgctctccgcgaccgcacccactctctacatataatatccacattcaattctctacatccttcgaaccacgcacaatgagccacctaacatccgaagaagcgcactcccgcctaggacatggcgagggcatcgaccagaacaccatctgcaattggtatgtatcacaccctcctcacttaaagttgttagaattttgataagaactctgttactaggccggtgactgaagatggtgttgaagatgatgctgccgctgcaagattccactggcgggaaacaggtttttgcctcgttgctcggatcggtcaacgaggacacatcgatggcgtttatgtcatttatgatatggattgggatggtcctttcaccggagaggatgggaggtattcttttgatgatagcaattggggtataccgcctggttttgagcacgataatgaagatgaggacgaggtacgaagatgagatcgagggtggggacgaggccaaggaagagaaaagcagatcttttgcgcccggcttgcagaaagaatgggggattttggtcgtagccaccatgtttggtgggacgaggttacattctcccagtccaactcggccagtctcggatttgtgtcgaaagacatattggtctgtgatgttgaagaatgacgggtggtccggcgatgcaaagagccgcaaatcgtggtagaaaacaaagcctcgatattttatttcaccactcactctttcattcatgtgaaaaagaaaattcactctcatcagaatcggctacatatgtcccatcaaaatcccctccctagttcccctcgccgtcataacatctcaccaagctaccctcccccaaaaccccccaggatacctcctcaccatgcacttcctcccctcatccaacaacaaaatgcccaacccgaaacacattggcaagaaccaatactccaccggtacctccgccgtccccaaaacactctgcaaactcggaatatacaaccaaaaaaacgccatcaccaacgaaaacaacaccgccggaaacaagtagtagttcctcgtctccttgttaaacaacggcggatgctgaaaaatactcaaccttctcgtcctaaccgccaacaaattgaaccattgcctacccctctctcatcagccacacatacctcatatcacatcagggaacaaaagggggaacttacaccacaaccaacgtcacaaagtacaccgaactagccacattcaacctagctacaacctcctctcccgacataccccccggcacccttccaaacccaaaccacaaatccccaaacttgaccccctccctctccaaaaaccaatacgccatcgcaaaggccaccaccgtctcaatcacacccacaaacccataactctgcacaatcaacctccaatcaaccaatctatccaccccgacccgtctcggaggcctcttcaaaacatccgcctcgggagcttcatacgccagcgcggtagcagccagacaatccgtaaaacagcaaataatgatcatcaaaaacgagctcaaaatctgcggcagcccaaaagcgacgtttgtcatgatgggccagaactcagcaaaacttccagcggggaggaggtacgcgatggttttcttgaggttgtcaaacagcacccgaccaaagcggaccgcttcgaccacgctggagaaggactcgagaaggaccatgtcagcggcctcaatggcaatgtcgctcccgccgccgatggcaatgccaatgtctgctgcgcggagggcaggggcgtcgttaacgccgtcgcctgtcatgcccacgacgtgaccgcggtcctggagctcacggacgattcgcagtttttgctcgggggttgttcgggcaaagacgacttcgttgtaggaggagacgagagcatcccattgggtgctgttgagggtgatgagatctgggccggtcagcacgatggactttgagagctcctcgtcgccttcttcagacggagtgtgttccttgtgattttttgtttcggtgggctcccgggacagagcggtgacgttagcgacaacgctgtctgggttggtgatgatgccgcactctctagcgatagcttgggccgtcaaggcaaagtctccagtgaccataaacatgcgaatgccagccgtccgaagaatcttgaccacctctgggatctcaggccggggagggtcaacaatagcgaccaggcccacgagcgtgagtccagatttggcttgctccaaagtctctgcctcaaaggcagccgaggaaaagggagacgacttaaaggagcacctggagagtgctttgtgggccagaagcaatacccgacgcccttgtgcagaccaatcattcttgatgcggttgaacttctctctaacttcaggagtcaaggtcatggcaacacccgaactaccagtaaagttggtacaacggtccatcaatatctctggagctcccttgatagtcaagagcctgtcacaaaatgtcagcgagtgggtactgggaggttgtgataggaagacttacatatcaccaggctcaaagacagacgccgttccagttggcaaagccaagctcagcccatcaggatgggtgtatcccagaacgcgaatcatgaacttgttcttgctgttgaaggcgaggttgaacttcgtagcccaacagcgcttgagctcagacacaggacccaagccttctgcaaaccgcagaatggcttggtcagtagcgtcaccgtgaatctttctttcgctaacgggcaggctccacgtggcagcgtcaaactctccagcgttgcaaagcccagcaacgctgcgcagctggtcaatggagttgctcgccatgtcaccgttggtaagtcgctcggcgatggcaacatcgaggatgccatccacagtcatttccttgccaccaagggcacagtctgtgaccagcattttgttctgcagatgttgggtaagtacgattacgccgaaatgatgagaacgcaacttacttctgtcagtgtcccagtcttgtccgaacaaatgacagacacagacccaagcgtctcaacagtcttcaacgacttgcacaagaccttgttcttccgcatcatattcgcactgatcgtcagactggccgtcaacgctactggcaagccttcaggaatgaaagccacagcaaccgacacacaagcaacgatcagattagggacgctgatccagtctggatacgtagtcctcagccaggcggccctatcaaacagtgtcagtgcgccgtcaagtgaacaagccatgcaggttcgtaccaaataacaacaaccgcaatgatcataaccaccatgatggaacaaatgacatagacaaagttgagaacctccctctcaagaggcgtcatcccctttttaggctcattggtcaacttggcaatccgtccaaacaccgtcttgctgccagtggcgacaataactccagtgcaagtaccaaacgagcaatgggtgccctgcaaaccaatgttcttggtctcgaggtagttctcatccgtagcatcaacagtggcagcaagagggaccgattcacctgcatagcgacaatcagcaacacctcacacttctctcgccaagttggcagactcaccagtaaggatcgaccgatcaaacttagcatcactcgacacctgcacaaacctcacgtccgccggcaacttattccccgccttgaccagcaacacatctccaggaacaatatcagcagccatggccgaaacctgaacgccttcccgaatcaaaagacactcctcaggaatcatattcttgatggaagccatgacccgagacgacgaccagtcctgccacatgttgaaggcggcctgaatgaagaacacagcaagcaagacgatagccaaggccaagttggcctgggccgggggttgtcccagaggcttccaagcaacgaagacgaggatggagccgacgaggaggacagaaccgaagcccttaaagaagtagcccatgatttgttggaagtggcgggtctccgggggggagggcgtgtttttgccatattcagtgacgcggcgcttgatttggtcttgagagaggccttggtcgagggaggtggtccagcgattgacaacgtcagcaacgggaagggtgtgccattcgaggtcggcaaggcctgtcatcatcagacatatcgtcagccttcccgaaccgcaaatgtgaccaagagaaaacaaagtacctgtcgcagcagcctttgagaccttgttggccacttcagccttgcggttgtaatcatcaatgtcgatggagctggtcaagcgtgttagtacacgttgatgacacacaagcctgctgaagacttacacagtccggtactgaataggcagcgccgcggagggatcaacaccaccaccggtattcgaacgaacactccgaattgacatggagccatgagagcgagtacgctcaagcccaggaccttgaaccggtcggctcgcagaccgaccggcctcaacgtcgttatcctgccatcgaatgcgagatttgtctcccggtttacccattacgagtcaatcggggataatatgagtaagactggtgtaacaagatagagtcaagacagtgcagagggaggagggaacaggtaggagaagtgagactgataacacccgactggacaaagggcgtaccagcttcttatgagaaccactccgaggaggcactgcccaagtacgtacagtacctccccctcccgcgccgcggcccttcaattgtgccattgctggtcctggagattattcctcgatagaggcaagccctctcccggaatatcacagcaagggcacatgctctgccgcggcatccaacgcaccaatctcaaaatagccatgaaatgagtgatctttgaaggactggtcagtatgcatctcgttggagactgaaacaagacagatgactgcgccaaaggaatcccaccaacctcattagctacctacaccgcggcgtcaatgatccggacgtagcacttgagttctgaagtagacagtgagggatccataccagagaaatacgtaacacggaacaccacaaaacccctcaaccccattccgaattccatgatgcgtgaaatgcattgccacggcgatgaaagtcggtcgagaccaccgcctctcgcatttgggaggaaggtgtgacgaagcacctagcacttgcctcaagctttcgcgatgccggaaggagcgatactcctcgtgtcgggtggaaagagctaccacccaaccaaccaaggtaatatgtaccccaagtcccctacctaagtaccttgcctcagtatccccctaaccgccaccagaaaatcactcatacccatccagctcagcacccatcccagccctgatatcaggaacctcccctcactgtcgaattaagcttttccaccggcacccggaaggcggaaaaaacaacccgagctgtccaccgctcaatgaatgcaaggagctttggccaacatccccttttagcttgcttctcctgtcgtagcttccaacacagcccccctttcccttttcccactgacacccacaaaggagaccggttctccccatgtagtcaaacgaatctagaacctctctctccacatggttgccatcggctgtgaggtgggtgcccttgccgctcggaagaggggctagctacgagctggtatagctccagtcagacgggcaagcactgccaccctcactaacactgagagagaaaaagagacaaagcacttttggataaaatattaccatgtcgtgtcgtgccacaacgggatttctccatgaggcatccctaacgctgccatcaagtgagcaagacaccataagaacggggaggcctcccggggaaatctattaggttagtatggggctgggaatcgacatggccaacgagtgagtcaactcgtatataacacagacagcaagccgccctcagacaaaggtggtcaacccaatctcatcactccgcatttaactacctacccaataaaaatttgtgtgaatattgtcgcttcaacacccccctttctagggtgttgacacactgtcttggcacccccagcaaatcccctcagcaaccaaccatccaaccaacgaaccaaccacctttcaatcacaatcacgttcccccatacaaaaaaagtattccaacaagtcaattcttcaaagctgcctagcttacatctatgttgtgtgtgtggtggactgttcccattgctcttggctgtccccaatcccacctgatggcccagtagtaggaaataccctcgcgacgccgagaagcgcaaaatgagcgagaaaaaaataaaaacaaaaagaaaaaatatatgtccataggatataccttccatcccaagaccgcatcacccaacacagcgcgtatgttttccctgccactgatcatcaatttgcgacaagaatggtggcgccctcgattccttgatccgacaaagatgcaatataacccccgccccgtcccaagaggccaatgttattgaccacccccaaacagtaagaaataaaagcaaaaaaaatcactgtgtataatcccccaacgttctttgcccatccttcaaacaagcctaacccgcaaaagccgtgacttcgtgaatcctgtatagggagctttcacgggaataaaaaaggcaaatgattgggccgtaggtaaagctacgttccaatagtaaaacggccataacagcagaccaaaccactgtgctgggtatcaatgtcgcatttctgctccgaaaccttgccgaaaaggcgatgatgcgaagtacttctgatctctgcgggacagagttcaaccctaaccaaaaggcagctttcaagccaccgcaattctccttcgcttagacggcgtcaacgcaatggcccgtacgctgcgacttcggcgtagcgtgattgcttcagaagtcccgcggtcgtcccgtggcgtgtctcctgcagaagagctgcgaacgcggtgtggcgtgcttcctccagacaaggtctcctaagccgaatcttgagggttaccaggtccgtcgcggtccattctcgctggcggattaactatcgtcgtgcccataacttggccaggagagtcagtggatggcgaggggctcggtccagcaacttgagcttgttgagcagacaatgtcacaacgtcgtagtctattggtaggccgtggtgaagagttggaggatgttggggtgccatgtgaccgttttggaacggaaccgactggggtaggtaaggcgggtggccccctacatagttaaaaggatgaagtgttggagcgagcggcgggggaggcggtggttgttgatgggttgggttaggtggagcagcatcggccatatcgtcatcctccgggtcgtcgtccacgacatcgacctccgtctcgtcggcatcgccattgttggcatgaatgacctcgccggttggagtgtctcggccagccccgttaacaccgccggctgattctccaagtccaaggtcggcaaatgtctgttcctggttcagatatttgcggaggttgacaacgccttgacctgagaacacgcaaaagacatcgcgttggtgttgggtaaaccctataataaccgtgttagccaccgatgtgcattgacagagcgaaaagcttaccttgaggaggctcacgagaaaatacctccaagtcatctctcaagaaggcagccacgcctgtgagactgagatgggtgagtcgcggacagcacttaagcagccgcaagattccctacgcatcttagtcagcaaaatccagacctgcaacggcgaaaaaagctgttaaataaataccttcaaagtaagatttgtgcagtagctcagatgaacgcgttccaagctgctgtggctcatgctgacatactcgttggggatgacatttccatgcgcgtcctttcgtaagcgtgctcgcctgttggcattcgcaagagcgataacacttgcatctgtgatctgggcacatttgacgagaccaattctcttcaacttgggcaaggtggccagcttcatcaccgagtcgtccgtcaggtgggtgcagcaaccaagatcaatatagcgaatgcgattgcactcggcaacaagcttcttaacggcctcgtccgtgatctggtggcaatggcccaaatggaggaaatgcaggttcttccctagaccagcaatggcatacagagcttcgtctgtgagctggcggcacttggcaaagaccaggttccggagtcgaggcgcgacttcaataatcttttgcacggcccgatccgtcaatttgtcacaagatgtcagatccaggatgcgcaggttctcaaacgtcctgttcggcaacgataaaaaagcactgtcgtcgatcatctcgcagttggccagtcgaagttcacggagagcctgtcccttctcaataagtgctgtaacaggctcgttgccaatcaacttgcattggtggagatcaatctcgagaatgttgggacagtgctcggcaaaggcaaggacggcttggttgttcagttgttggcaatcattcaatttgagctatgagacgaccagttagcacatctagacacagagtacaatatgaaagcaaatacgtcgaggcttgcaaactcaccctcttcaaaaacctgcagttctcggcaagagtaatcatgctctctggagagaccttgtggcatccactgatgttgagaccctggagtcgcttgcagtactgggcaatagcatagatcgaagcctccgtaatttggctgtcgttggaaacatcgagtgccaacaagtgatcattgttagtgatcaatgggatgaggccagtgtcggtaatcttgccgcagtttgtgagggtgaggcgttcgacacgggtgcacgaggcaagaggaacaacactgccatcactgacggtgtcgtgcagacacgcaaggttgaggcgcttgatgaactccctgtagggaaaggccggagcctctgagctgagagtgttgcaaatctgaacgtgcttgtcccatgtcgtgcacgatggacgatgccacaaaatgtcaaccgcattgcgagcccatctcctacatgtcaacatgacgtggaagacatcagatagactgttgagcttggcaaagatggcgatcaagatctcgtttggcagccggttgatgggcggaaggcagtcctcatcgttgacctgcatgtcctggagatttggtacgccgagagaggactgtgaatcatttgcgccgaggaagaaatcggattcctcattgtcaccgccgggcgctggcgagctgctggatgaagtggagcggccatcgtcttgtgcgtcaacggcaaggtcgatgagttcaggctgggcggactgttgttgttgtcgggtgagctggtcgggtgctgctgctgctggctcggcgacggtgctgctcggggcgtggttggaaatgattgcgcctctgtcggcgatgatatcgagggacgcgcgctgtctcatggttgctaaagtcattgtcgactcccgcggcgcaaagggcgggttcggtgggaagttaagcagagggaaggacggtgactgtcactgaggggaggcgacccgaccgtaaatgtggagtgcttgttggtgcgctgccagccgtcaattgtcagcagggggcccaggctgtgatgaggggacccggcccaaaatagccttggtctgtgggtccaatgacggtcggaatctcaagcggttgagggcgacaaagatagatacctccagctatctgtgggtgatggaaaaacaagaagacctaggaggcagcgcaacaggtgttcgatatttgagatggagggtttgtctgggttgacaggaggaggtggtgagataacagggggggggggggcgtggttctacaggaaggtgagtttgaatgacagcgtgtgcgatgacggtggcagggaaggatgccgtgataggagacaataaagagggaaaggcctgaagccagtcgctattgtgaaatgccacccaagagtttttacctaagaaggtgggctttctgacaaacttgacacttgggaagcaaagtctgacaaagatgtgtgcttcatgccttctctattcccatttcccattgctgtcactttaggacttccacccacacattcaacagttgccctgctgcggacgggctgctcgagggaatgtgtgaacaaggcaacctacctacatggggcgcaacctaccgaccttagggtggggttattggctgcccagaggtcacacttcatgggcacttgcggtggtttctttactgttcaaaatcaaacctcgatttccatctgaaattccatgctacgccaagtaactttgtgatgattactaggaagctgatcgatggcagtatggagcattcatcaagcgacaggtggtagtgtcagtactaacgtcccacctgcaggcctgatgcagtgaatgaagtaccagatgcggcacctgagacaaccacctcaattcgccgcctgtgtgcttgggtaccatagaaaatagctgaggtggcaggtcctgtccaactcgttccaatgaccatgctagccacgccaatgtcgaatagatcatggacacggctgtggcaaaccttccagcggcgtctcgtgcgtagagtcacggggaaagcggcagattcccaggagggcgtacatcttgacgagggagcttccatggaaggaaagctgggctgcgaatatcggcaaaatgatagcaagtgttatacgaagactccagctgggcaacctccagcgccaccaccggatctacctcatcgggatctcgggagctagccagtaacccaatctctgggccatggaaggacgcgatagctttcgggtagtcgggtatcttaaggtggtcaggctgtctgagatgccacctcgatatcggttttcagaaagacactacgcgcggccagtcatttaggcccgccgcacggcattcccttcaacttgagaaacacagcaccgcaacatcacagattcccagcatgcacgtctatttgttcatgacgtgcgcatgggcgcttaagcattcggctgcagtaaccagtcaaagcaaacagtcagcatgtcaagatcctggagatagttggcgcccctcgtccaaatgatgtggtttgctgagaaacatgggacgccacgtgcaatgatatgtgtgacctcatccttcagctgcagggcaacatcccataggcgggaagcttccttcgtagcacagggctgggcgaccatgttggtctcaagttggtcggggtgtctggcctctttgattcgaacttgaagtggttttattttgagattcagaacagttgaagtcaaagtccacctttttttgaggatcaccacgctagaaatgatccaatgggcatagcgtcgtgattcttgaaccaagacgccatggttcggcagacgacccactttgatgacggaccccaggcaccatgatgtcaaattgaccctggggacgaacgccaagctccaaactccgaactgacatccatctcccataaggaacatcgaacggacgaccagccgacgaacgactgcacgcaggggagatcaccacaataataatacggctgcaactgtaacagcatcatatacacacacaatgctccggcagcccctcctccggcaggcagcccgcaccgcagcccggccctcctccgccatcccctccctcagacctcacatccagcgccgaaccctcctctccaagcgctccttccgccaaaccggcacccgcgccgtcgagaacctcaaccttcgcaacatcgcccagtcctcagccgattaccaccgcaacaagcaaatcttcctctcctgcggtatcgtcgccggcatcgtctccttcatctacgtctcctaccgcattgtcctcgagatcaagaaaaacccaatacaagccgacgccgacccatccaaccccctctccgaccccaacgcccccaacaggaaaataatcgtccacgatgaaaacgggaatgaaatcgtgcccacaggccatagcgtcgtccctagctttccgcggacaatctcgttgccttcttttaccggaccgttagatgctactgagcctgttcaacctgggacaatcaccaccgctgctgccccagagacggagtatacccttgttggtctgggaaccagaacagtcaccttcatcgggatttccgtctacgtggtaggcttttacatcgcaaccgcagacattgcagctttgcaatccgcccttgtcaaaaaggtcaaccctattgctaccaccctcgtccctggagagcgggatcagttgaggaatgaactcctcgacccagccgaaggcgccaagttatggaatgagctcttgtctcacaacattcccgcccgtactgccttccgcgtcatccccgttcgcgacactgacttccaccacttgcgggatgggttcgtcaacgccatcaagactcgcggaccagaattatccgggaagggggtggatgatgaggcgtttggggaggcgatgaagcagtttagggctgtgttcaacaggggcaaggtaccaaaggccaaggagttgattctggccagagatgacaagggccatctcagtattgcctttgatgggggcaagaagtctggtggcaggcagttgattggggttgtgccggatgagagggtttcgagggcgttgtggttgaactatctggctggtaagcaggttgctagtgagccggcgaggaggagtattgttgagggcatcatggagtttgtagaaaggccggtggggacagttgctagtatggtcgtgccgctcgctaggtgaaaatctttggttcaggtgaggaaatggatcttctgcctttcgctaggtaagacactggagtgtcttggcaaaagatgttttgaagaaaatcagacgcgaactgtattgataatagccaatgtttacaaagatttcaagttatgacaaccaacatgacatcccattttccaagcattgttatgttaagtgcaacgcaaaaaagaaagcttgcttcgcttgctaatatcccataatcttgaatgttggttgagcctttgaccgtgggtatcccatctcttcccttctgattcctcactctctctccatttagagagcaccagcctccttcaacaactcctcaagcttcttgccgtccttgcccttgctggccacggcctcgagatcgctgttgccaccaatgtgctgcttgttgatgaaaatgtttggcaccgtcctctggccggtgatcttggcgagcgcggcctggatgtcgtcgccgtcatcctcctggttgagctcgatggccttgtacgtggcgtcgtaggagtcgaggaggcgcttggtgttgttgcagtaggggcagtaggacttgctaaagaccactgtttttttgcgcgcaatacttccatggttaacaatgtattatcaacggcaagggttgggggcgcatatagaggggcaactacgtactgacagcattgtcatcgatcaactgctgggctttcttctgggcggcgtccatggttgctggtgaggttgctgaggagaagaatctgcgaaagaagaaggacatggaaagacaaagtgcggggaactctcgagttaagaagaggtcttggaaacggagagagggggggttgttggtgggttttttttaaaaaaaaggctgaaatgggatatgcaaacaagagaggcagctgttttggaatggaggggacgaacggtacaaaaaaagcggttgcgacaatggattgtagactcgcaaactactacagagtagggactgtagaatctccacatactaccccgggatattagatggcgggatgatggagcggatcggacggatttgtcaaccttccttgtcttgaaactgctgggacattctgtagtatggggttgattattcaggatatgaaccttatgctattacagcaaatatgctacggatcctagataagaagtatttggaattgctgatgggttttgcggagaggctttctttgttcgacaagtctcgcaatttgagatccgtgcttccgcttgggattgcgacgacggcagccccgatttccaatgacgcaagtgatctgtgcgtaagcgataagataagcctgttgagatcaacccccaccttgggatctctcaacgtcaacgatgaaatgggcacatgaggacatgtgaaacatcaagctgagaagtgcctgcttggttctgggaatagattcgttatggaatttatccgagcagcagcctgatcacaacggggacggtaaacaaatatctcagtcctcccctcgtggtattactcacacaaaagcggatacaccactgaggctctgctctgtccgacacaaaccgggctagaagccatcatgcgtcgttcacagcctactttgcccacttcacttgttacgctgacatgagccaagagctactagcaagaccgcagcctatgtagccagtcgtgtccacgagttgaggctattcacgacgtctgtttctcttaccaagtggaacgacgctggtggacttgccctgcatgacctcactttgtttctgaggcatggttgtgattgcctaatcgattgcgccgttgcgggaggcgcaagcaaccccacgggggggcaaaaccatctggttgagccaacgcaagtaatatcacgaatgatcgctgccgctggatatcgtggtgtactttgaaccagtcggcagcccacagcggctgagcggatcaacgatgccggcgatctccatgaggccgtaactaccttgagtgagtgactaggataatcgtcgtccccgtgttgaagccgggacacaagccctcgtgatgatgtgcccatcccgtcattcacctctacgatggagtcgtcgggcaccgatggagatcggttctgccggttttgttgtgaggccatcaatggttccaagagttcgccttgtgtttgggtgtcgacggcagcttgcagcggttgcctgcgtcgattcggcgaatttccagcagaaaccgcatgttgttgggagtgggagttcatgaccgatgaacaacacaatgaatgaattgttccctgacaagacagagtccctacgagcaaatggcaagcccacagtggcgtggaaagtggggtcaagtgttctcggaggcggggtcagaccgctgggttctccagaaaattggaacagcgagcaagcgaactcctgcctgggacccttgcagcctcgaaatgacccatcccatcagacccccgaccaagggttcaaagcatcggacgacagagaggacaacacaccttgtccttttccatccgtgatcatcgtgagaaacgtccaattctgccaaatctggaagtttgaaaattgccgtgcaaggacaacgcaactcttgtgccatcccttcccaaaggcgaccatctccagctgcccagcctcggtcgcacccattggccctgcaatcttttcggccccgattgatgcgttctcttgctggaacacatccattcgaagccatcgtcaactccgcgaagcccctcccttagcgtcgttccctctactggtataactgacctcggtccaccctctcgttcctgttttcctcttctcttcccagcaggtcgacggcacattgtcgtaggaccaccctcagtcgtcaacgtggctaccggtcaaggagtattggcatcctcgggtgccttcgcaaccaatcttgccaataatatcacggcagtcctgcagaagcttccgccctctctgcaagcatacctggacaccacggtcgaccacttgtctggtgccaccgacttcctccaatcaagcacgggtctttctccgaccaccctctacaccgcaatcgctacggttgttctcctcggcgccattccagccgttgcagcgggcaacaagaagaacggcatcatgcgtcgctacggtttctccagtcgcccaagcctctctccttttagctccagcctcggccatggcggcgtccccaacgtcaccgacgaggacttcagctacatcacctcgcaggatcttcaggaccaaggcgtagacgtccctagccgttcctatgcccctccatcacagtactacgacgtctactcctcctctgccccgtcccaggcttacttgcgtaacaagcctgaagacgatgttatgctggtcaagtaccagggcatcacctacccggagcactttcccgcctactgcatcggcgacggaaaattgcttgtcagtgatgtgcgggagcgtgtgcggatgatcatggacctcacagaccgccaggcaaagcgtgtcaagctctactacaagggacgccggttgagagatgccgacgctcctgtaagggaatatggtgtcaagaacaacagcgaggtccttatggtcttggatgattcaggtcaggcaagcagcgaggacagcaacgaggagttggttgttgtcggccgcaacaagtacgaaggccaggtgatcaggaatgggcgcgagaagagtcaccgatatgccccttcctcgccgaggacaagccggagggatggcttcgggggacgcagccctcgggagaccacatcatctttcggcagcctcgacattccggccgatgatggcagaggctacagacgggccaagtccagggttcggactcagtctccctcgggatcggccctgtccactgccagcgcccccaaccttccttctatttcacctccccctatgggcaagcctggcggtcctattcagcgacttaacaacctcgcccttcattttgagacgacacttcttcccttgtgcatcgactttatggcacggccacccccggacgccggggaaagagaaaaggagcataggaagatttcggagacgattatgcagcaggtgattctcaagctcgacgaggtcgatacctcgacagaagatggagccagagctagaagaaaggagttggtcaagtatgtccaggacatcttaaagctcgttgatgatgtcaaggcgaagggaagggtataacattcggcctccttcgtcaaattataggagtgccttgacatagtttgaggaattttccccgcacatttggtagccaggatactggctttttattttatttttttactggttttaatgggttagcatcgtcctttcatattcactcagcatcggacgtgcggtagcggaaacattgatacgccaggccgtgtattcaggaggaataaggccatggattttggaagcgtctgaaattaccgtggtcatatggggctacacaacaagaagggagtttgctttctcatcttttgccatcgaaagggggatcttgtcttgggaaatgccatggttggcatcatggatcgcgggcatgagcgacctcaacagaagaagtacgagagtactacaaaaacaaacttgaaaaaccagtaattaaaatatgatttgttctcgtttacatgtgcaaatccgccttcattacgatgtcccactgtatgcattgagtagatctgtgtacctcgagtatagcttactcctggtgaaatgccgttatcaagttatcgttgtttgcctggagagcaagctgctgccggacagctggtggagcctgtcatggcgcaggaaccttgataggtgggcccccactcgagctctgcccggtaggtctaaccctacctttggcctgaggccacaactcccactcgcttgcggcgtccccacccatcccactttcggcctagcgcatctggctggccttcactggcacacggccaattttcagcacacacaaaaaagtcgtagaccgaccatcaaccatcgcgcagggtaaggaacagccagactacgcagcattttgatcggctggagtttgactgatcaattctttttctttagtttccttcctttccccagtcacttgcggaaagatgtcgtccttcgagtctgtggtatgtgttgcctctcctctccatctcggcagtttgaatgcaatgcaatcggaagtcgagcacgcacgacgaaaccgccaatctctcagccaccgcccagcacactgcgacgcacaatctcgaaaccccaacgcgagcgaaatcagcaccaggacgaagcaattgcgaggaggtacaaccgagagaggagcgatggtggctaattctggtttcaacaggtcgtgatcgatggcaagggccatctgcttggtcgtcttgccagcatcgtcgccaagcagctcctcaacggccagcagatcgttgttgtccgctgcgaggctctcaacatctctggcgagttcttccgcgccaagcgtacgtcacaaccttcttcttcatcgatatggcacgggaattcgcgacgggcggagcagttggatgattggaattgcgcgttggaggaggggcgccgggggggagaactgctgccggaccgaaggatggaggacaacatcaagacgaaccagttgactgacatttggaaacagtcaagtaccatgcctaccttcgcaagatgacccggtacaaccctacccgcggtggtgagttgaactcctctcgaacgatcgatgtccgaccaagtctgacaatgtctaggccccttccacttccgcgctccctcccgcatcttctacaaggccgtccgtggcatgattccccacaagaccgcccgcggtgccgctgcccttgagcgcctcaaggtcttcgagggtgttccccctccctatgacaagaagaagaagatggtcgttccccaggccctccgtgtcctcagactccagcccggccgcaagtactgcaccgttggccgtctcagccacgaggtcggctggaagtaccaggacgttgttgccaggtgggtgaaattccggcgaatagccagaagtgaccgaggatcgcaaagactgactttactttctccagactcgaggagagacgcaaggcgaagggcgctgcctactacgagcgcaagaagctcgccgccagacagctttccgaggcgaagaagaccgccaaggtcgactccaagacgacggaggcccttgctgccttcggttactagagatagtgaccaaaatgcatacctttgtcctttatgcgatttcatcttagattggcgcggtggttcggggcatcatcgacttcatatgcgtggctgggtggataggcaatgggctatctaacaacactatgcgtccccaggcttgggagctcataaaataactgagatcaaccaatggacaatgcggttgcatggatgaaaaagaaagcacaaaaatacccggctttggcagtctaggcttcgtcagtggtgctatagggtgtgtgccgacgtgccacgcctcatcgttttgacggccgaatcgccaaggccatcccttccattttacgctgaatgaaacgacaataatctgcaccggtgctggctctttctttggaattgtgacatatgggacactggtcagctggttttctcaagtgagctggtcgaaagggctatctggggtgggatcaagggcaagcgggtgggagaagggaaatcgtctcgagggcgcggtggtgtacagagctggtccttgatggactcgtaggctctgaggcctcgtgtgacagggatgagtcctgtttctatcaacttgccatcaatccatcacacgtgcgcctatcttttgctgtcttgtctgtgccgaatctgtgctttgtcgtatctccagtgccagtcagtcctccatattgcccagacttccgttcttatcttgtgggagcatgacgtagttggtggtgatatgccacatgttcactcgttgaggcttccttcatgactggtatgcttggtgaccaatgatgagagagtctatgtcttgatcttcattgcttaggcctgacgtctttctatgaacgctatgagtcaagatataagctcttgttatcatgcttcttggacggggatatgtcgacacgttatgtttcagttcgtcttactttggcgccagaagtatctttcacgctgtttaaacatgacaagtagaaaagttatctctaacgtagaggattcgaaggaaagagcttgtagatgttgggacattgattctgttgctgtggttcgcgaggtgaagaatatatctgggttgtaagaagttatctacgagttgggatatgggtaagcttggtagctggtgagaagacactaaattgaccgtcgctcatgtttacgtgatacatcatcatatctacctacaaagataggttaaggtactttttgacaaagtatgtgtaatgtaaagggtgttgggttctgtgatgtggtttgaggtttgtattactgtatatgtcaatttttataaatgttctgaaatttttgaaatacatggtaagtttgaactgttatcatgttttttccattctttaagcaaatccatgctattttcacggttgtaatgccatctggaagtttgtcattaggcctgttctaggtagtaaaataccaaggtgccaaggtgaaacatccatgctggctcatggtttgaagtggtcggttatgaatcatttcaacaagctgaaaatcacaactaccttgcctatgcgaaatacgtagatatgtattatatcttctctccagagggtttgttgatgtgtctttagtaccttatgtatgatggaaatatacatttcacaacaaatctcaggtgcaggtaaatcaagatgttggaatctcatgacaacttgacaagtatcccgctaaacacaaatcgaaatcttgtaaccaccaggtagttttcacatttgcctttctcttttttctcagatacctttacacctctttgccgccgatcatattcagtgattcacagcttgccagcccccgtactcccactcctcacactccccttctcatccgccatcaccaccacactcccgcccgatctccgtctcctcacaaacaagaacgccaccaaccccacaattcccaacaccacaagcgtaaccgccgcgccaacaaccccagcaacagcattcggcatgccccctctggtgaacatctcagcagcaacaccagtatacgtctcgcaaaacccatcgctgctcccacaagcagagcaccactcctccgcactcccaatagccctccccttcatctccctagtaaactccccccaagagagactctccctcccggtcccaaacagcggccaagaatccaaccccccagcagtcccattcttaaacaaaaacctcacccaaagatccttctcctccgggaaagaagtcctcgtctcacgggaataaagctcaaaagccatcgtagacgcataatcaggcaacccataaaaactctcacttacctccgtcagcccggcaagtccaaaaaacgcaagaaacgcatcgtagctccccgccaacagagaaaacttgagcgcgccctccaaggcaacagttttgttcagctgcgtcacgatagcagacgataaggtccgggcatggatcgaccgctcaggctgcgaggcattgaaattgtatgcaaactctgcgctgtcggccagggtgcggagttggaagagttgggagggggagatggaaaaggaggagttgtgcagccgggcgacgttgatgaggtcgtagatgtcgtaggcggaggcgtagcttagatcttctggggaggtgatatcatataccgattttaagacgggaaagaggctttggtagaattcccgggtggaggtgagtttggtggtgaattcggggctggattcgaaggattggctggcttgggtgacggctgggcagttgtcgtcgcctttgatccagattgcgtcgggggagttgggggggatgccttggagggtgatgtattggtagccgtttaagggggaggtggattcgcttccgttgttgagggtttgggttgcgattgaggggttgaggtcggcgaggggtgggtagaggccctggaggaaggcggtggcggtgttgaggaggatgccttgatttggagcggaggcgtagatttgggaggggacgtagttgaattcggagatgttgaggatttggtgaggggagctggattcgatgtagcgggcgcggtagtcgctgccgatttgaaagttttgggtggtgccgaggttggtgagggtttgggcgccgtagtgtttggttgttcctggggagtgttagttgactgatgaatgatgttcatgtcagagaggtggtacttactatctccgtgacgggtgaagacaacaactccatggaccgtctccgccatggctcttcccgccaacaggctcagcacagtaccagctgcagcagtgaacatcttgactgcggaccaactttccggatgataaaagcttagttgcaaagaccagtattcagagctaccgcatcgatataaaacctcagggccggctgtaacgacgacgggaagtgggggaagctccggagatgcgataggagatccatccttcccaatccacttgcattagatcccagcctatctaccattcgaacctatcagcgccataatggcccgtcaaaccttggagttggaccatgaaaattagtcactctcgagtcatggagtcgctacgacctgcccgtttgattccaatctggcgatccttccacaaacttggtggaggtcggcggttgtcgatgaaagcttgtatgcacttcatttgatgaagagagacatgttgctcaagttgcagatacagagtgggcgcagtgttgactttgtgtacctgcttggtatttctgacagatcatggcaagtcagatatttctgctgcgaccttaacaacttgtcttgatcgttttctgaactaacataaaagtggattgcaacatcgacaaaacagatgacaacatcaatggcaactcttcaagactcttgcaattgttttcggccaaagccacagacttaacccctctttctgacaatatctttcatcgaatcaaacagggagcttggctcagttggaagagcgcaggtctcatacttggcagtatgatctgaatgtttaacatcagagttatcctgaggtcgtgagttcgagcctcacagttcccactatcttttgcctagagtctcaaacacaccccgtacaattttgcggagctttgtttcttggtaagattgtgtctttttggtgttgtccgggttagaattattccctagagctaagggggagaaccgatggttctgtctcagagcttgggcgaggagcatgacatcaacgcgctccacttggcagctaagcgataactccgagaatgaggctcttatcgtgatgcttattatgagcagtgattctgatattgtgttcaaggaaaacaagtaccctttctggtaataccctccctctcttcttttgtcaagagaccccaactgcttggaaccatagcttgcaaaagatccctgtcctgttagcaaacactcacatcagagacaagttcaccatagttagctagggccatcacttctgcagagtgaacgctgtttaatgacatcgcaactagcaagttatctatgtctcatcttcgttgcgctttaagcctccccaaccataattacgtctcatcatacaaatgtgtcaactacaagtacaacccctcgggctcaccctcctgcttcgtccgcaacactctctcgcgagcggcgcggaagtcggccatctgtacccgcattctgcgctcccgaagagccatcagaccagcctctgagcaaatagccttgatgtcggcacctgacagatcatccttctgcgcgataaactcctcaagatcgacgtcctcattaagtgacatcttgctagtgtggagtgtaaagatcttgcgcttggtgttctggtcgggattctcaaagaggatctttcggtcgatacgtccgggtcggatcagagcgggatcaagagactcgatcttgttggtggccatgatcaccttgacgtcaccgcggtcatcgaaaccatcaagctggttgagaagctccagcatagttctttggacttcacgctcaccacctgatgtcgaatcgtaacgcttggtaccgatagcatcgatttcatcgatgaagacgattgacggggcattctcggcagcaaccttttgacatgtcagcaaggaaccaccaatcttgggcagacgaatgcttacctggaacagttggcgaaccaaccgggggccgtcaccgagatacttctgaatcaactcgctaccaacaatacgcaggaaagtggccgaagtctggtttgcaaccgccttcgccagtaacgtctttccggtaccgggggcaccgtagagaatgacacccttgggaggcttgatacccatctcctcgtacagctccggatggagcagtggcaactctacagattcccgcacctcctggatttgctgctccaaaccaccgatatccgcgtacgactccgtaggcgccttgtcgagcttcatgacgctgactatgggatccgcgtcatctgtgagaacaccaacgatgctcacagtcttatggtgaagcaagacactggcgccgggctccaatagatccttgtcaacaaaactcatgatgcttacataatactctggtccagtcgtgctgctgacaatggcgtggtcgtcgtcaatcatctcttcaagggttccgactcccattgggctaccacgcatgtcgtcaacacggccacgttcatcggcattgcgatccgcagcctcggcttccgaggcagctggaacggcattgtccttggcggctttcgccttgcgcaagcgctcttggttctcgacatattcctcctcgagcaacaggtggtcgtgaacacgctgcatgcgcaacagcctgagcttgcatcgactggtcgggtagacgggcggtaacttggcggcggcactggcaccaccggctctcttcttcttgcgaccgatgcgggtggtaggtctcgggggaggttcgtgcttgtgcttctccttctgatacgatagcatcgtcagcaacgtcggagtcgatgacgacggatgattgtcagtagcaaaccttcttgtccttgtcatccttgccatcgtggccacctcccatacccgactggttttgaccctacggaaagttagcaaatagtcgagcgactcgagctttggtaatcgataaaccgaccattgtgacggtgggacctcaggccgccggagctgtgaatgtgaagtggttgaggtgtgtctagggtggccagctgttaactggtatcgacggtttcgaagtctgcgacgatgacggtgaaaatgtgccgggctgcgagtggtgtcgctgattcccggtgctgcttgctttgtgatgctggagttgaagctggaagctggcagctgtgttgggaatcgccttgcaggccaggccaccaggcggcagagcgacgcgacatctgggtcccgccctccgcacgagccaactacgcagcctgcaattttgaccaatggcaggcagccctgggacctgagtgcacagaccccagttatgagccaacatgcaggagggggcatggattgatgatggcaaacaacggagccccggaaacactggcattccattctcattgaacaccaagagtacggcgccaaccagaagcttctgtgtagcatacggacaacctggaaaggttccagactttgacagagaggtggctcaaaggccttccatgaatccataaccgtctcctgtgtttcccaagaaagcccacgtctctgccgcccgacgtgtttacgtagtgtgctgcatgcaatatatgcaggccggtgtatcactcctgcctccccatccgcctcgtctcgaacatcagcgctgttcacctttttgcgaagtccggtcttctgtctccgcttccgccatacctgctctcagatagaccaaacgttgggtgatccacgatcagagccacgaagccggaggtcactaccacctccttagtttccagggtccttgcgcttgttgctactgttacccctccaaagttgggtttctgacttcgttggcccctcccaacctttttgctcccagacgacaacacatgccaacttttccgagagtctccgccaaaaccttcgacccgctgtgaaaattgaaagttccttgtcacctctaccaacttgcacttttaaacaacactctcgtccgtctcctcatcgcacacgaacaccccttgctagaaacaacccggcttctacctacttcacacaacgacccatggcctcaacacgagagcgccgaatctccaaggagctcagcgacctccaaaatgaccccaactctggcgtcagcgcccacccggtcgacaacagcctccttcacctcaagggcatcttccctggaccccccgacaccccctacgccggcggcacctttcaggtcgacatcttgatacccgaaaactaccccttcaaatccccagtcatgaagtttgacaccaaaatctggcacccaaacgtcagcagtgtgacggtacgtcagaccaaacctgaccaaaatagtggcggcggtggtggtggtggtgtaagatatcggcaaaatggaacaataccccccgaaacagcaccaccaccaccaccaccaccaaataaccacccctcaggagagaaagaaaactgtttgctaaccaaacctccaaacagggtgccatctgcctcgacaccctcggcacaggctggtccccagtcggcaccatcaaaatggccctcatctccctccgcatgctcctcgaatcccccaacccaaaggacccgcaagatgccgaggtggccaagatgatgctcgagcaacccgaggcgtttgcccaaaaggcgcacgagtgggcagtcaagtacgccggcgcgccgaggagggacacacctgtgcacaactaccaaaaggttgctccgcccccgccgagggcggacgatccggcgaggtatggccctttctatccgcaaataccagtcaaaaaagtttaggctgacatgattttgtcttggtggaacaggtaccaaggctacaacaaagacctcatcgaccgcttcgtccacatgggctttgaccttgacgccgtggtcgaggcgttcaactatgttggtattgatcgcaacgggggcgaggactacgtgttggaggaggcttacatgggggatatcactgcgcggttactcggtgagcagtgacgggtcatcgtggtggtttcaaccaacctgggcggggcaacgacagcaagtgtaatcaggagggaggggatgtctgtggtagtcctttacgtttgcattggggaacggagttttatggctatgggcagatttaattgggggtggtgtttgtgacttcgatgtctttacagggagtactggctttcttttctttccttgacaattagagcccggctctggatcggggctttggtgctgtatttatggtcctgttttcacaagcggagagtataactaatatctctgcgttttccatcattgtgagcgttggtttctatatacatgtcttacgcattcttctgtttcaacaggttgttgtgtttaggcacatagtcaggtctttcatgattcggtcacaacatatgacctaaattatttttaagcagctttacaaaaacaggaaaccttgccatgcacacatacacgacagatcaggtatgacccccaagcccgccgttaacccccccgccgccgccagtctataaagattcaaggatatgataaaatgcatcaaggggcaaaagtggctgtatcacacacgcagtatctcttcgtccgaagtgtcccggcgcccaaaagttaatcctctctagtaaaccccccgccctgatgtactgaaccgcatccgcttgctgttaaacaaaagtagaaaaaacatgtacagtgagtggctagcaagaaactagcatggcatttcacctatgacttcgttcttttataggaggtcacgtctgacgaactcgtcacggagggccttgcccaagctggcgggcgagcgctcgacaacaacaccggcagcctcgagggccttgatcttggagttggcatcacccttaccaccggcgacgatggcaccggcgtgacccatgcggcggccggggggagcagagataccggcaatgaaagagacaacgggcttgccgccgttgacggtgttgtactgcttgaggaagtcggcagcctcctcctcggcggaaccaccaatctcaccgatcatgatgataccatcagtctcgccgtcctcgaggaagaccttgaggcagtcgatgaagttggtgccgctgaaggggtcaccaccgataccgacgacgagggactgaccgagaccagcctgggtggtctggttgacggcctcgtaggtgagggtaccggatctgctgacgataccgatgcggccgcgcttgtgaatgaaaccgggcatgatgccgatcttgcactgaccgggagcaatgataccggggcagttggggcccaccaggcgggtcttgttctgcgacttgaggattgaggtgatgcgaaccatgtctgtgggagaatccccatgtcaaaaaagttgctcttccagatttctggggttgttccagggaaccactaaccatgctgggggatcccttccgtaatgcacactacgaggggaatctcggcggcaacggcctcctcgataccagcggcggcgagtgggggtctatgattgccggcaacttttgttagcgccataatggggtcgctggggggtatggcattcgggaattgcttacggcacgaagatggcggtagcggtcgcgccagtctccttcacagcgtcgctgacattggcaaagacgggcaggccgagatgctcctgtccagccttcttggggtttgtgccaccaacaaccttggttcctacaacagggcgggatatgcgtcagaatcgggtgttttcgttgattcggctccacctgtcaggcatcgttgcccatggggaagatgggtttaccatagtcaatcgcctgctgcgcgtggaaactgttggcaaacaaacgacgtcagcacaatgagttcatcgcaaccttgagaaggagacctccaagtttggaggggaatgagttgagtggtcttccgcttaatccccgcttgggcgcatcgcaaagcggtctgcgatacagcgggcggcgggactgtttctcagcatattggaaaaacaacttacgttccctgcttgccagtgaaaccctggaagaggaccttggtgtcgctgttgatgcggaggttgttgatggtgctggcgtagggggtagcgttggagctgtagctgcgctgggcgagctggcgcaagaggttgccggcgggctttgattgtctgaaggcctgcattttgtttgatgtgtgtgtgtgctgcagacaggaatatagaggaggaaagtcgcagtaatagcggcgagaagggggagacgggggaaggtcaatgggaaatatcaacggtaaatgtcgtcggtatctttcagttcacgaggtcgagtgcaccgtcatttctccaacagcctaccatgtccaaaaatgtctcccgctcttggcagcttcagggaaccaaccgcatccccatctttgacagcatggatccacaccgcccccattggccggcaatctaggtccctgctgcgacggtggtagtgtttttccgatgtccgggtacaccttgcggcacgctcgccctacacattgggccgattcaaagcggctgagattaggttcacacccatcggctaggggaggggtgcaatcaagcaaatccttatcactttcaacttgccccgccaacgaatattgaagctctgacagaccaaccacgaaatcgaagaggacgccgagaggcgatttattgcgccgacgactattacgaacagacaactagcccctgaggccagattggaggggaaaaagtatccaaaatggctacagcaactattaccaccaccatccgcaagaaggatgcgaaccttccaccagaaaacgagcgctatctgcggtgttgcgcagatgtcgccaacgccctgatcgaggaccacgaggcatccagagaccccagcaagccccggaaggatatcaatctcaacagcctgcgctccaagttcgcaaagaagcacaagctcaacaatgtcccaccacttacggccattattgccgccgtccccgaacactacaagaaatacattctccccaggttgatcgcaaagcccatccgaacatcgtcaggtatcgccgtagtggcggttatgtgcaagcctcacagatgtccacacattgcctacacaggaaatatttgcgtctactgccccggcggcccagattccgatttcgagtacagcacacagtcctacaccggatatgaaccaacctctatgcgcgccatccgggctcgatacgacccattcgagcaggcccgcggccgtgttgaccagctcaaggctctgggccactctgttgacaaggtggaatatatcatcatgggcggtacctttatgtcgcttcccgaatcctaccgcaacgagtttatctcccagcttcacaatgccctttccggatatggtacgcccgacgtcgacgaagccgtccgcgccggcgagcaaagcagtatcaagtgcgtcggcatcacaatcgaaaccagaccagattactgtctcgccagtcacctaacagacatgctccgctacggctgcacccgtctcgaagtcggcgtgcagtccctctacgaagacgttgcccgtgacacaaacagaggtcacactgttgccgccgtcgcagaaacattctgcctttccaaggacgccggattcaaggtcgtttcccacatgatgcctgatcttcccaacgtggggatggagcgcgacctggaccagttcaaggaatactttgagaaccctgatttccgaactgacggtctgaagatttatcctaccctcgtcatccgtgggacaggtctctacgagctatggagaacggggagatacaagggctacacgcccaacggcctcatcgacctcgttgctcgcatcctggctcttgtaccgccatggacgcgtatctaccgtgtccagagagatatcccaatgcccctcgtcacatccggtgtcgagaacggcaacctcagagaactcgccctggctcgcatgaaggactttggcacctcttgccgtgacgtccgcacccgcgaagtgggtgtcaacgaagtgaaaaacaagatcagaccaaaccagatcgagctcgtgaggagagattacaccgccaacggaggatgggagaccttcttggcctacgaagatcccaagcaggatatcttggttggtttgcttcggctgagaaagtgcagcgagaaatacacctttaggccagaactcacggggcagccgacgagtttggtcagagagttgcatgtgtacggcatggctgttccggtgcacgctagagatcctagaaagttccaacatcagggcttcggcacgttgctgatggaggaagcggagagaattgcgagggatgagcatgggagcgagaagttgagtgttatttcgggtgttggtgtgaggagttactacaggaagttggggtactggttggatgggccttacatgagcaagtggctggatggaaggccggggccggaggaatagatggtgtgatgatgatagctttacatggccaaagaccggtttgcatgaataggcgtttcttggaaagaatgggaagggatgtattgatgactgaaaagaaaggacgttctattttgtgtgtatttgttgacaggaaaacataagcaaaggtgttgatacatgtcgtgatgttggttcaccagccgcattgctcggccacagacagccacaaaagatccttggcactcacccggttctcttgcccctttcccggctgttatcatctcaaaaacacagtgaaggcgtgatacatggtatatatcacggcagttcgacatcactacatatcaacacacaactctccctctagtcactagctcctcatcatgatctccccgtcggacatatgccaatgcttaccaccaagccctctcagcaggtcatatctgtatcttagaggtctagttctagatgagcaaacgacatgggctcaatgtcgtcaatttatgcttgtttcccagcggaaactctagtccagaaagttactagcgaaatgcttctgtcagatcgccaagacggacgggtgttggcatggctacggtgaaccggcggtagagatacgaactagcagctacacggcaggcgaggggaacgtgatagggctgagagcttgtatcttccgcttatgggacaagctcgtgatattgtcgaccagggacggagttcttgcaggcctggagggcagaatggtgcgtttctgggcgcaaggctagtggctagccgatgtgaactggtgatgttctaactggaggaggctgcggcgttgggcattagaggcccaagagcatcaggcagaaggattctgtttggggttgggcgaatggatgtctcgaaagggcgattgcgtgctcgtgaaggtgaccgcgatggatgctgaaggaggtataggtcagtcttggggtcgggcaaggctcggtggcggtcatttgattgcaggcaggttctgtgaaagcatcagtggactgtgcaaggcgacaaggggtgaggaaagcaatggggttatatgatggcgagcagggggacaggatgaagtataaaatgacctagagtcctctctttaccagcatgtcttcaccactatccagcatctcaagcccatcccaatcaacgccagcatcacctgtccatactcaacaagttctcttcatcaaacaacaccgccacaatgcgcttcacaatgaaaataaaccttgccctcgccctcggcaccttcctcctcggagcagaggctgctcccgctcccgctgcctctgcccaggagaccgccaccaccaccaccgacaaggtcttcaaaatccacaccgacgacttcgtcaagtacttccccccaggcaccaccccttccccctcagatgaagccatccccgccgccgtaacccccagcaagctcaagctcaagctccgccacccctccgagtcccccgagacctcagagaacgcagccgccatcctcaccaagcgcggcaactactgtgggcactcctccttccacaacgtccgtagcaacgattcccccaccaccggtgactgctggcaaatctaccacaacatcgccggcggcggctcatggcaggtctggacttctgctcatcgcactctggtctcgtatggcgggtgtgcgtttggtgtggaaattgatcaggattggatctcgtttcagtatgtaggcgcgtgggacatcagggatttgattcgggactcgattaacaactatgcttcggggggtaaggttgggacttggggggagatggagtgtgggattaagtatacgaagtgggggttgttttaggggaggaggttgctctggaggtggatggtgatgaaggggagaagggtttgatcgaggggaggtgttgggagatggggatgatgatggtgtgtttggtgtttgcagtcgcggtcgcagttggcgttgtgggcgaagatgggtgagggagaggatgtgtcgaggactcgaggtagttagagtgtcaatgagagcagacaggtatcaagaagatgtgactttgagattcagagtatttctgatggtgacgtgactggagccactactgcatcctgtttctgctttctgctcagtggtagttgaccgtggatcaaggaggaatgcgtggaaaccgggctgttaaagtcgacagtggatgatcatggatagatctgccttagtccttggaatggggtggacaacctatcaagaactgacgaagaaatgccagtaggcgtcacggtcagagtatttccggggaataacgacgaggtttatggggtgcctgggagcaagggcgagacatgcgggactgaagttgtggaaggtgggcgggagggagtagtccagtgggcagggctgaccaagagccagcgctgcgttacccgcgttacgcgttccctccttccaggttcaccgtgatttgcatcctgttgtctttggactcaagcgatcagtatcagtttatctggataatccccattctcctttcttgtgtctgcccggacaaaagcctgactacatttctggcccacaaagcattataggtttttaaaaggcagacttttgacagaggcctcagagagttctattccaacatgaaaagatctctcaacacaaaccgagggagctaggcagtgttgatgcaaggccgctggtgtcggccgcctgccaagctcagatctggaggtggtgtgccgttccaaggggtaatttccagttgctttcaggcaatactgtacaaaatagatacctggcttcaagtgcctgccacgcctgcccaacttttgcgccaatgactaatgtgggtggtcgagtgccccttgagacaatcccaagtctcccacacaatcacccgaccgccgacgccaggtgcaaagaccacacggcaggctttcccaatctccttgccatccatgcattagtttctctgtcacacctccttctctgtaacttccacttgttcctgtccgtttgtctcccccttgtccttcttggtcgttgactggcacacgcgctccgggaccgacatctccaccaccagactcccgagaccagtgacatccgcggtgttgctaagatcaagaggctctccctcgaaagcgtgagacaaactgaatgttgctgagcccaaagcctccccatgtgatcttgtcacagacgaagctccatccctaggtgctgcctgaagttcgggttcggtgaggcaacctgaaatggcacgcttgtcagcttgagcaggaagatgcataatgtatagtgcaatatggacataccgctccgtatgaaactctccgtttcacaccagcctccgaggccttggaggtcttgatctctcgcgttatcttggtgactgcccgtggctgagcggttccgttagcaccgagacctcacggcccttaactcactgcagatacgcacccattgtgacgcgaccaaatcttgccttgagtgttgacacgatggaagcggttggagacctcaggagagcactccctcaagactctttcgtcttatatatgggaatggattcatcatttttactacaggacatggcccatgttctctccgcgcgaggagcacgagtgtttgctgactgcttcgttgatagctcatattgctttactgcagctgtccttctcggcggtgatccgcggcagcaaggtcgctgaagacatctacctggacgaagccggggaacgctttgcaggcgcggcagaagcaacactgtcagaatgcgtgtgcatttgctagggattcgaaaagtattacttgaccaccacatgaccgaatcattctccgagctcttctagttcgtcagagccttgtttacaaactcgatgacgaccatctacctaagatacctatcctttttgccccacccgggggccacgacaatctgccttatcgacatggccctgatgtgagataccagcatgtacctaattctacctattcaggggctgagattgaggagattgtgccttccgcatggggatatgtcttagaagacggtaatcctcaacaaaagtctatgtacctcgttgtagttgcaatgtatccagagtcggtgtagcagatcggcttccatgccggttcctcggcttccccctgccacatgcacgttaaaatggcatcaaggaaaagaatttcgcttgtcttagacgcaataaaaaggagaacaacgacgtctcggagccgccgccacacgggaagaaacaagctattataggtacctaggattctttcccaactagtacgctcgcactgtctacctgcacgttctagccacaagcatcacctctcctgttgccaacgacggtagtggcatgagccatcaggctggtagcgtcttgtgtgtgatgttatgaaaatcctcagtacactttgcggcgcagcaaggagccttttaacttggcggagccgacttttgccgctgtctgccttgcttcgaggccaatatccaaactgtcgggttgccctcgggtccaaaacttgtattttctgcctcagaatcaatagcggcggataataaaacggaattttgtctgagaaagggagggcaccaagacaagagttgtggccgacatcagtgaggcagccgtgggcgtggtctggtggtgtgaacaaacaaaagaaacggagttacaaaaaggccaagatgaaacaaacaacgcattcaccgtgcacctagataggacacttgttctccggaaaattgacattgcccggacaaagcaaacttgaagtaccaattgctataactggatagtggcatccccccagcctgaacttggtggcctgctacctcccctaaagccgcacaagatctagacgacccaatagaggaccggatcgatgaagagattccataccggatgccggatacttccccgtcgcaccccccctccgaccactgtttgttttcaagaccgggcatgacctgtgcagctcgcgggcggcacaggcacgccgtcaaagaataccccggctgggacggatatggctccggatcattgacttcccatcccattggctctcgaggtagactctaactctcaagcccccggagttcattctgctttccaggctgctggctagttctaatctttttccatccagaatccgtgtttttcctcctctctgtcattctacatacccacagcacctccaaactctaataaactggatcggtaaaggatgaaatcgaattttgctcccagagagcgacttaatcaccgggctgcccaacaatgtcatcgtcctgccttttggctggcgacgcaaggtcttcattcatctttctcttcttactcctaatttttttttggtgatagctgtattactgacatgataacatcagtcgtcttgaagcctgcctaccgaaatctcaaaaaccggaaacctctgtcgacgaaacttgagcgaaacccaactccgccacgtcgaaatataccaacaactgggttcacaaaaagccttgcacagttgctctatcagtggcagacctgcaatatcttgaagacaattcaggaaatagcaatgtgagccccacgagatgctagacaaagatggccagcgtcgcgtggacagaacgcaaccccccctccttcaagtcgagtcggataacggctttacagcaccacaagtgtgctgctgtaactttcaacatgtagacaagacgatcaggcttggttcaaggcgttgtcttcgtttgaagtctgttgtcacttggacatgttgcctcttggtcagtaagcgcagctcaatttctcgtcttggtacctagttccctcacccagcatcatcacaacatacggcaaggtggccgagcggtctaaggcgccaggttcaggcccacttgaattaaattactcctagagtatttcctggtctcgcaagaggcgtgggttcgaatcccacccttgtcacatctcttttgctcgttttggattcttgttcttctttcttttgacggacagtacaactgagggggagctgcaaggaggcttgagaacttgtcactggactgtaagatgaatgggatatgagagccgtgaatgcgctggaggcgacgatgttcagagactctggaaagacattagggagggttgctctcttgatgacgcaagtcattaaagtctttatgaaggagaaagatggccaaatctaaagcgaacacagaaatccaaagcccccaggtgtggaagtccagctcctaccaaaccagagttcacatcaaacaccctgtccattcctcaaaataccatcagactcaaaccccatagcaccgaatagaacgccagccactggccggtaccaactctctccccccccgacaaagcaatactagccgaaggaataggagcaaactgcgtcctactcggacttgacaaaaccgtccccggccccggtctctgctgcaccaacaaactcccctctccaccaccaccacccgtgaccctcgcctcatacgaagaagaagcagccgtcacactttcactagtatctacttcgcctgtcgtgagccccacagtcaaaacctcagtcgtggtggtgatttcggactcactcgaaaacagcggtctattctcagccggtgggaacattgccgtctgcgtaggtgcagcctgcggtgagagatgacaataactatcaaacacagccagcgcagaagcagtagcttccggctcggaaggcatgcactttgatgaggcggccctgctgattatactcttgaattttatcgagctggaggcgcagaagcaggagtaggaggttgtgcggccgccgtcgccgcagccggagaccatgttcctcacgatgttggacaaaggggcttcggcgcaggggggaagggaggagtagagggggacttggttgatgaagattctttgggctgttgttgctgtgacagctaggagggggaggaggaggaggcgcatggtgcctgttggatggtgtttaggtggttgtgttgaggagggaacaatgaagtcatcggggtgggtggtataggtgggttttatcctgcggtggtgaagccttgctgagtcgattcagagattggtgttgtgttcaaacggaagatgccgcagcctcgaaaagccatcagcgtttgggagattaaaatagttgggaatacgcgacggcggctttatgatcattgccaccttttgcgctgaggaatgaccatatctgacgctctatcatcgcgcagtaccgactcgacaagaagagacaaaatttcggcatgcagggaaaaggacttggctgtttctaactaccggtcgctataggtagcctggtcagatgtggcgttcggcgcaggccgagattctttttctgagctcacaagcgcgcgtttactgtttgtcagctcgtccggtgttggaccctgaaatgctcggtggcacaaaaagggaaaatatttctagccttgccagagctttcgtgttcattggtgttcctggcagggaagccaacagaaaggcccccaaacggcatttcggagctgaaccttttggccagttcaggcggccatcaaaattgcaaagttatacaagtatggcagagcgagcaaatatcaaaccgacctgatagactcggtaatcagcgatcagttcttgctttgatggtttgcttttctgtttcgattttcataccttccatcccaaaatgccgacctcgcagagcgaccgggtggccattctgcggagccatcgtgttcgatggtttgtggtcggctggctagcttggttgagcatttctggtgcgctggtgatcgcactagcaccgtcttctcccgtcataatcgccgtcctctctggagtatgggtcttgtcagtcaccggtaccatcgcagtatccttcctgctgctgttggcatcacctaccactgagcgcaacaagccattgtggcttcgactgaaaagcaagtatagccgcaacttggggagtactgtcataaccctgttcgcggcggcggtcacgctacccattctgtactggagtctctgggatcccgagcgcaggcggaacgttattacgtttgatcgtgatactgtggtaggtcacccccaacttcacaccctattcttgaaccactgtctcatcagtattgaaacctcgcaggacagcgttctcttcccctcgatcaccctcttccaacgagccgactggacatcgcaggccaacctcgaagttgacccaccccccaagtgtttcctgggatggcacaacgaaaccgccccagactgcgatatcacttcaacatcatacaccggatcttgccaatgcagcaacagatggagtgacagaatcgaagactttgagtggcaaaacaccagctaccgcgccttcactctgacgtcgtccctctcgatggtgtctccaatgccaacataccaaatgatcgtccaagcgttctttacctgtcagttagccccctcctcaaccccgaatatacctgaaagctgacacagaaaacagatgacaccaccaaagcccgcaccgacgcctcccgcgttctctcccccagcctctggatcgccgtttacgacccaacattgacagtccgagaagcactagagaacggctacacccgcatggttcttatcaatgccaacggtatgactgctctgaatctcggactcaactaccgcgaggcgttgggccatgcaccggcgtatgactaccacctctccatatcgacaacaccctcgatggatttgcagtgcgacacatctgatgcaaagggagcatcagggctgtgctggttgagcttgtttctgcagtttccgagtttcgagaggcaggtgtcgcggcaggatgttgcgatgaagtggcaggatgtcgcggctgatgctggttcgtggtttgcgctgtttcaattgctggggtggattacttctgggttggcgtggtataaggggtgatgaaggcggatgctggtcatcctgaagcccagaagcgagatgctcgtatacgataatggtttggtgaaaaaggtggttgttaaggtaagcataatgtcggtaatctgctttgtatgataatgatttgtagttagtcatgcccctatctgttaccctagcgacataattctttgtttattctttcgtgatccacttcaggggttcagcacaagccaacattctccccgtgtccccaccttctgcagagtcacaacggcccatcctcacgtgaaaatcactacagcgccgtgagcccacttcctgatcagtgatcccctgcccattggccagaacctcccaaaacgacccctccaagggtctaacgccaagacctgtcttaccctccaaaacccacgataagagaaatcccccccacttggaaaggcaaacaacacaccacgcagcacgccgcaccaccaagtgcattatcaccaacctccctgaccgaatcacccctcttctggcagatataattttctgcccaacggcctcttctctcttcagtatttctttttccttcatgggacatttgaagcaacaaggcggcatccatttgatgcgttgaccaagacacacaaaatggcctccaccaccaatcaccccagaccgcctcagtaccacaacccatcctgtctgtccccacaacaacgcacaccccgcctcatcacagcactttctttcctccccgccctgccgctgctgattgctcatggggtgatatcccagaatgccattcctgctgttgggctcgcgccgctttttgtttcggcttgcgtcggtgtttttattttgctgcagctgaagaagaaggagaggaggcagaagagggcggtgagtggggaagggtatggggatgatattgaggggcatgggagacagcatggccagcacggccatcgcgggaggatcacgccttctgatgatgacgaggatgaggcagaagagaaagactctgtgtttacccatcggatactaatctttttggtggatgctggcttggcggctgggttgttggttgtgttggggttgacggttattgagaccatcaccggaaagccttatcatcgtggcaagcctgcggaggagggtagcgatgagggcgatgtgccgaaacctgaacctgggcctgaagttgttgatgatctgagaagggcggagttggtgatgctggctgcatatggaacgattcctttgctggtcaacttgtgagttttgaccagaatgtcttgatttggaaagtatgtatactgacagaagatatagtggcatccatttttacatggcaatcagagagctgattgctggcttggctattcatggcttgatccagtacaccgcttggcaagttcttgaccctgactgcccgcactgcggtggcaggttgaggccggagcacacgccagatatcccatggtatgagacggtttctgcgccttccttcgcagtgccaagcgttgcgttgcccgaggttcctgctccgaatgtcacaatgccaaagtggcagtggaagaccccgtcttggctgtcgagaaagcagagcgaggacttctctggcgcagacccggatgccaggctgtttgtggacgatggggacaggtatagggacgataccactgaggacgaggcagcatccacgactggcattgttgctggcactgcatccgtgggcccaggccctgttgtcgaagaggtcgtgaaggggaagaaggacaagaaaaagaggtcttcaagcggttcggggtactacgaggatgaggccgggtggccctaagccaaagcagagtgtattgaggagttgatggtggatggtggatgtgtcgcgcggtgttgaagcgtgggagctggagggaggtgggctgcgtagcgatcagctggtgtgagcaggtagtctgagtttggtggatgtcttttttagatacccttgtttgctgttcttgatttcgaaggaaatatacggagtaggagttgctgttctcatgatccgatgaaaatatggtttcgcgcgctctcgtggtaagtgatgggaatcatgcacgggcccgctgatgcctgctgtgtttgcttgccaggctttgaaccgccgcaaccgcgttccgacccctcaatttgtcaatttcgccatgctctcccaagaaattgacctcagaacactggtattctgcccatatgaaatgggaagtgtgctaacccttcgacctgcaatagagaacttgaaacagagcgatgacgaaactcaattgctacgcgtcaggattaagaagctccagcaaccctggacactttcctgctgtatgcctgtcgatgttctgagcgactgctcagaccgtgtcaaggagacggcctttctaaaactcttcgactggcgcattgctgcacagcagcgttccgatcaaggtgtcgatccatggaccgaggaaaccgctgctaagtacgcaaattttgctgtaagccacgaggccgagaagtttcttgaacaactcagagaaaaccaatatcaggaaaccgacgaggattggagcattggccaggatgagacatttcttgtccaccagacacttaacatgtacgacggcgagactgctgtttacaaacgtctctagcctctctagggcacaataataccacgcttgatggctgccgttgagcttgatattgcaccacctactatggagggcgagaagttcagagacctcttcagcgtgcagggaatcttgctcgagtatctccctgatagcttcacactccgaaatatcgacgccatggccccggctgaggatctgcagggagttgtcgaccaagccgttgagatcgctcgatcattgggagaccacgcgagttctgaacacagatgttcgactcgaaaactttctcgtcacatcatgccagagggaagatgcggataacaatgatgcagatccgccgaggcagacttaccgggtcgtcatgttggactttgcgcaaagccgggtgcgaagagaagacgaatctgactttgactggggacgtgcaaaggctcagcagaatgaagaaggggccgtaggcatggtcattcgacactacctgagcaagcttggaaaacaagtatcctacacgccatcgggacgctatgaggaatttgcagaaggggagtcggaggatgagcaatgatctggtgactttgaggaacatttcaagcttttaggtcgattcttcaagctaaatccaccgagccaaatcttcttcgtttgccaaccaggtctttcatctcttctcaacatcatctacctgcaccgtggtagccttttctttctctgcaggtaccccgccaacagaatcctcgacgagctggcgttccacaacataggacgagaactttctcgcgctcacccccttctcaaacagctcttccaactgctccaagctcctcccctttgtctcaggcacatagaaaaatgcccagagagcaaggaccagattgcttgacccccagatatacccatacttcggcccccatcccagtttatctgggttgatgaagtagggtgtacagaacgacacgacccatccaacgataaagttgagacccgaagccgtcccgacagtctgcgatctcaacctctgcgaggggatctccgtcgacaacgcccacataaccggcccctgaccaatgccatagatccaagtaaacacgatactcattgcgaccaacgctctgctcgccgcaggatctgtccacgccgaaacagtatatgcaatcgccatcccgtacatcatccccgccgagatcaccgacgtcccgatcagcagctctcttctgccaaaatacctcatcgccggaaacgccgccatatttcccgtcagcgcaatcgcaagcgaaatcatcacccactcaaacggcgatccaaccctcgcctgcacaaacaaatacaccgaaaacccagccataaacgtcacccccgtcgccgtccccccaatcgtcgttgcgaagcagagcaatgtccttctcaaatccggaccccgaaacatatcattaagatgaacacccgaatgcagttcctgctccagcaaaaacgcactcttgatatcctccacctctgcccggagatacgcctcgtctttgatacccctcaaccgtctcaccgcgttgatcgccttctcgtcctgcccttgggtgacgtagaaacggggtgtatccggcaagaaagccaacaaaatcgtcaagattgtcggaacaatgtacatcacccccaggggaacctgccaaggtgcgttcccagggtatatcttgcagtaattatccaccaaaatcccaaacagcgccccgagggaggtttgaaaggtgctcatccccacaatcggccctctcagcaaggctggcgcagattccgtcatgtacgtcacgctgtaggggacgaaaaacccgttgcttactccaagcagtaatcggcctgcgtataagccacctagggaggttgtcccgatcatgaggcttacgctcaagaaagcgaaaccgcaaccgagccagagaccgatgcggcgggagagttttgtgtgggaggcgtacatgacgatggcggagaggaagccgccgacgttcatgagggattggatcaggcgctggacgtcggtggagatgttgaggccgatggggttggtggggtcttcgtagccgtagacgcggaggaaggcgggcatggattggaagccggcgatggcggcggagtcgtagccgtattggaattgtccgagggcgatgaagaagcagatggttatgatgcgcttttcggcgaggaagttactgcgaaagggggcgggaggtggtttgggggtcgggtgggccatagtgggtggttgatgggccggcgaaggtgtactctatacggaagctggggatggtgatggtgggagaagggaaatggtgagaggcaacaccacacccaggtttagatagaggatgaggagacctctgggtgggagggacagttcggggtaggcatattcttatctggctgttactacatgccttgggtgggatataagtcgatcatcctctgccgggaccgcttcccctcacttctccaacaaacaatagaacaggaagtctggaaccgggtgagtgttacacaagaaccgttaaatgcacttaacaagcggaaaccataagagaagctgtattggctaatcaacgggggacagcagatagagtggcctcggactccaacacactttggacatatgcaaggatcgaaatatgattatctcagtgaagaatgccagaagaaaaacatgtggtcaactcccgcactgggatattaaaacggttcgtttggagagatcttgcatggatggttgaagcatgggtctggtgtataatacccgcatgtaacgttgttggcagtcatatcgacttgattggggttcttgccgggagccgaaaggaggggagattgacttccggcaggttaggaaaatgatacaggggatcagttgacggcaaattttgggatgttgttcccaagactccaagaaataagtggcattgcattttgtcgggccatcaagcctctcaactgctacctcgagctactcgctatgatgtcttgacaagaagcccatcagcctcccaaagttccagtcttaccaaggaggattacccttcactttcaacgcccccacccatcgaaccctgatcgccataggtaaacggatgcttggtcggcgagtcatcgcagttggcatacgacataacaatataggtacgtgcagcatgtgtgtggttggtgggtcagccatagtaccccgaatagccaatcttgacacattggttgattatagcgttggagacctggagaagatctagcgtactcgtcgtagccgcatcaccgccaggtgggcttctctacctcgtagaacgatggtgagtaaggtaggcacttacaccaagccacagtttcgaggaagacgtaaagatgtgggttgtggtcattgtggagcagttgcacaacgaaatttggcatgtttccaaggctgttatcccagtcgccaaaaatgtagaatcggttgttggaatggaattaggaatggtagaagcggacgactgagcgacagtttcatggagatggttgcagaaaaaaagaaggaggaagcctgcgacacgagagttgaaattcatcttgatgtagttgactgttgacataccatacaacgtatgattgctctctcgctagtttacatgaagggggtggatttcttgtgagaggaagcgctggatttatagtggacgggatctttcacatgatagatgttgactttaagggaaaggtgtttgaatgtttgagtgttcgagtattgcgagtctgcgtttgagcgcgacattcacctcatgctccgatggccgacacatctattcaggtgtgatcagaattgaaacgagcacttttcaaggcagggctaacataataggctacctggacttgtcaggtgagctgaccggttgcgatgattgtgatgggagaaaagtgatacggcgattgtcacggtttgggagattcgacacacatctcctgtctgtctgtattgatgcaaactcttctgactgcctttcagggtcccctttttgttggtagtcaggactagtcatacggtggtataatgtctcggctgtagggcctcatgggtccactcaaaatgatcaaacgaacttcagcaaacataggtacccacctagccttcctcaaccaggcaggcctcctgcgtttcagaacgatccaaaagacatgttgcccagctgtccacagtgccgagatgcttcaaacggccatttgacatcaaaatcacccgccaggtgccaaaacggcgtccggttatgagcggaggaccaaccgtgccatgtggcatcatcttgattgtgggggttaacctgactcttcgggcagctggcacctactgacttgcattgacttgagttaactagctgatgaagaaacaactttcaccgagacgaatacatccgtacgactttttctcgaaacatcggtcattaccgcactcccaactgtgccacgtagcggcattttggttgtggggtggaccctgagcgcgttcccgtgtctgtccttgggacctgcatagaagccttagagaaaggatgatattctggaaaaaggacacagcctgattggctactgctctgagacaccacacccacctctccgattcatagccttgcgccatgtgattggtctcaatgcctcgccggtcctgagttctatgcgccttcactgactattaataaatatcttagattgacactgctgccaagaatctgtgcatgcgcaatgatcgggctttgtcccaaactaaggcaagacaatgcagaaggttgatttgttccctctgtgggtcaggttatgagacgtttgaggtatattcgttgcgctccatgccactcctctgtattttccacagttctcagaatattatcacttttttcttctgcctcgggttcaccacattcacctaggtacctgatagatgctcatccagaatctttggcagacataaacacaggaatgtctgtcgcattatatccaggctcaacagacaattctctgctttattcatcgataccatcttgcagcgaggcttcgaaaccacgcgcctgtgcatgatgtggcgttcttgttggagacgttcatgcagggtctcagctcttggcgatagcttcactcgacccagattgctacgaagcaccctcatgcttgatgatgcaaccacttcaggggctttaaagattaaatatggctgattcgaaagtctgtgtgggagggaggtgtgaacgcctaggcttagtggcttgctcaggggtcaggtaaaatgaactggaagggcgccaatgggtctgggatctcgcaaggctacggagcttttgagtagaggagaagtataaacaggtggtgatgtcttctattaattagactgtgttctcaacagcgtcacatcttcttcaccccttgccttcattcgaccgattgcctacctgcctagcatcgaaccattcagttgtcatacgtaattacatttccacacttgaattcaacacaagccgccatgggaaacaacgtatgcgctccaaggggacaaaatggctatagctgcgacttcgagattgtcaggagtaacttctttggaaacctttcggcaaataactttgactctggcaacgtcagtgcccttgaagagattgagcaagtcggagcagatcctgacatcgccgggcccggtgtgagttcttcacttccatctctgctacaatttggcacttatgctgacaaaactaagatactcctcgccgtaatgatggcatttgtcgtgtccattctcattgcctttttcatccacgtgttggacctagtggaaatttgttcagggcaagtgttacatccaggctgccgatgttcgagattcaaggtgctaacaggaccatacaggagaaaaccagcaaagagagtccaccatattctcaacaagatcctggtctcgtggagcgatcagcaaattgtccttggcattgcaattagcacagctgcgcttgaagagtggtgcagcttctcaacctaccacctcaacatcatcaaacactggctgattctctcttccatcacccatgtcaacgccctccttgttcactgcaattacttccaaaagaaaaagattctggcaacaacattgagagctggacttatctcccttcatgtcatcttcaccggtgttgtggtattcggacatggacaagctgccgagaacaaaatccccgaaatccaccatcaaacgcccctgcaaatcctgccagcaagctgcttctttgcaaactccacaagacccagcctcattcaacaaatgcatgtggaaacgccggaaaccgagaccagttcactttcgagcaagtcactgttcatctggggaattgtgctgattgtttgcagcaagctgacactgttacgtcatctttgggcgactgaggataggaagaagcgtcgtttcatggtatggtgcattcgactagccctgcttggactgaatgtggcactgggtgtaattgcaatcactggtgtccaaagcattcgcagctggatgagtgatgaaggcttgatcgatatttcagacggctcggagagcgagtattcttacgggcagtacctctcagcttatctggcattgtttgctgccttccagattgctgaaagcttctttggtaagaaaggctcccacctgaacgatatgttttttttgtcttagtatcaaaggctcctggtgctaactatttgactttgcagaagatattgaggagtagaatctcttatacggaggtcaaaatggtccggtatgatgtatctggctacctaagtatgtacgatcagcggttttcgtatgggtgctgcctgtgggaatgggggtggaggaatggtttcatctcttcaacgtaccatgttttcttgtcgctacagaggtgaagatcaaggggaattgtaccaacagtttcttagtatgtaaaagatgtgtcgagataagtaagcatgtatcttaggcgttggtacccctttgtgcgtctagtgaatggtgttcccgctttaatcacatgaattccatctcgctcactttccactctcgccatgcttccccctgcatgatgccatctacataacagtctccaacaagtctgaaccgattacagtactctcttctcactacaaaaggggaacgaccccctgccaaaagcgccacatcatcgtcaaccttcgtgtcatgcggtacgagtgctaatcttccatcgtctagccgtgccagtgcctggtcaagcggtgttgcaagcacggtatccaatctgtatggcatgccgagaacgtaggataacctactgttcaaaagataacccccaacagccgagacaaaatagctggcgatggtggattccaaaacgaagttggtaaagactattgcagcggtctgtaaccctatccaacacagtagataaggcgggactttacccataccgaagaagttgattccaagtagtagatgataggccgatggataatagtagaaaggtccagccagccttagtagcctgagaaatggattccatcgtatagatctggcctgagtgtggaactgtgctatagcctccacgataaaagtttcatttggatagtcggtaaagagagaatcaaccatttcgactcctctcgggcccttcatcaaggtttcaaacatggcatacaaaggatttgtctcgctcctattacctagccaggtcccgtcagagagagctaggtcggcatactccaaaaggattcccattgctgcgccttttcgaagacagttttcgaagtaagttatggccagcataagtagtcctgacctggttgataagacgctccgcatgatgccattgttgagtctttgaaaggtatctgcttgagaagcgcgagctgtgagtttaaggattccccggggtgtcctgtggccaacaaatagatggtgaatttccatcggtcgacacaccgcggtgatcttccccgcgatcattccgtaaagtatgagaatactgttgtcacgtaactgtggtggtggacattcggagtccccggacgcgttgtaagcgttgtatagggcaggtctgacatctcctgtccggttgtatgggtttccctctgtcagatcccatcgaggacgtggaaggcattccgagtcgtactgccagtttggtacccatgatggcagatcatcgtctctttttatgaagctgggagagctacattgaacaagcaacctcaggtcttgcgactgttgcaagattttgaatgcgatatgtgtgtaacactgagcggttgataccgcgtacttgggccctggcaaatcatccatgaagaaccggcgttcatcggggcgtaggagaccaattaagccatataccttatcccggttatttttggcacacgaccaacgaaattgaaccagcagatgggaaaggctgtaaaagacacgaggctcgttatccctctgcaatctcgtggtttcatccaaggcacggaagtttggacccatgcccctcaaaaaccacggcagacactgctccatcgtgaggatgaagatcttaaagtcgtcccagtccaatgtgcactttgatgtgagaatccgtgatctggaagcaaggctcatctcctgaatgacccaaacacgactccagtacggatgccggagaatctgaagtagaccaaccacaatgtcgtcggtgaaggaagtgtcttctctcagcgcagccgcggtagcggcattgtgtattcgattcaagtttgtgttctcatccatggtaacgacagtcatagtcaacgctgcaagaaacctcattgtaagttccttctgtctccacttcacggcgtagctcttgcatgcttggaaacagagattgacgttgtcaggaagaaaggactcggtgagccagatcaagacctcttctgcttgggtgtagatttcacccatgagatcaagctgctgtcctttttccggtgctgcttcgttctgatcgatacaaatcgcgtcaatccatagtcgctcattgacaaactcgacgctaagatgctgcaatgcccaatagaggtgtctcgtcacttggagttgaaccccgttgcattggatcgtaagagggttgctcgagtcgccccagacataggacagagccttgtactgagtgcttgccaatggagcaacctcaagagaccagcggccatcagaaaaagtcaaaaggcggatataagggcctgtcgtgtcggagggtggtggcagggggagatcgaggtgtaggggagaggaagtcatttgaagacgaaattggaaatgaatcaccgtgtataaaaagcctgataggtcaaaggttgaggacaatgaaagcaatgatatgatgtcgtagaatctcaaggcaagagaatttaaaaggctcaattatgatgctctgaaagaggggttgtgcggctgaagctggacggtgcagattatcgtggcttagcgcccacgacgttgatatgccagaaacctgaaacagaagatggctcggcctctctaggccaggaaaatacctggtacctatctcaacttccagcgggccatacacttcagtaaaaatactgcaaatgtagaaatggaggcaatcttgctccttggtcacctttcgcccaaatcattgtctctccactacaggggggtgagcccctgagcccctttgtcaaatgaggtatggggtgccaaaaaggtgtcaattctgttgttgtacgagggtgagttgcccaggtggctggaaaaggccgaacccagtgggcccggttgactattttgacacccttttgtgggtcccatgacacaacaacaacaacaggttagggttactacactgctacatctcaacgtgttttctcccaattcaactgactgtgaacagtctccgcttatttctttgtgatacacgaacacatgaagtagattcaggacatgctgttgacgtggaacttttgaaaggtgtgaacacccgagcgctgttcctgagttgccgcagtggctttgtcaacaactgccacacgcacttctccgccagggccatgactatggtttgctactactttgaatgatagaaaaaggcatacctcagacgacctgcgtttgtgacgtagatcttcactaggtactgtttggccggcttcaatcccctcgctgtttggtcctggcaggtacagagcagactggggcctgggaatcaggtgcctgggcacagcaggttggttgctctgaattatagacctagagatacatcatgaaatgaatcaggcggtggatcttcaaccttgatggaatggatgtgctcagttgtgaaactgcatacactcgcctttcaccgaattcgccgtcgatatgtgattgatgttcgtaacatgcgatcttctatgaaagcccgtagtcgagcatggggatatttaacatgtctgttgtggtcaagttgaagtttctgcatttgatatcatacccccatggttgtgaatctccagttgatatgctccaaaaaactgacattggtgaccttctagaaactaatttcagtacgcacctcaagatgcaatgtcgcgctcaagacgtcagaagaaagtacacgcaactgaccggggggcacgcggaaggtccgttcatttgccagcaagggtgaggctgttgagaaaccacaccccgcccgctgaccgtaaacgggagcaacatatcacaacagtcacccaatgtcggaaggtcggcgaaattttgacacggccgtactccacccttcacttccccggagcaaaccaaggcccgtttcacgaccgagatctcctcattttccttacacaacccgcaaactcaaaccactgtccgtcagagcgcagtcatgaggtggccatcttgagatagtgacgcatcgttcagtggactagcttgggcttccacgtgtatttatatgtacaagaatcgcttcactgggctatttactcagtccctttccgtcacactcagaaatcaacagatcgagtcatcgccaaaattacaaaatcactctcgccgctgccatcatgcacgtctccaacctgtgcctcgcggcgaccgcgttcctggccattgaagttcaagccgcgccagccacacaagccacaaccaatgccctccacgttggtacccagaacagccccgtcggccaccactgtggagtctcgacctacctgaactacctcagcacctctctggtcgatgactgtctgaagatgctcgacaacctttcgcctgattctggtggtggcggtgaagatggtttgaacagaggcgatatggactggtgagtcaagtcagactctagccttgctactctaacgtttatgctttgcaggaccatcgtcggcgactttcaccgggagattggcaaatactcaacctgcgcgttcggctgccatgtcacctacccccaaggtgccctcgctatgatcggtatcgatgatgttcaccgtgtggtgcagaggtcgatcgagatgttcaagcatgcgggcgatgggggagataaagttggagctcagggggattttgagtgcgactttgctggctcagctgggaagacggtcagttggtatcttttcaacccgatcattaactcgacgtgttttggtggtgggccatggtctggatgatggtgagagcggagttgggtgggcaaggttagtttttggaaatagtgttagggtactgctggcggacttatacactgttttagggctgggagaagtgatatccctgtctgacagctaagactctaaataattgatcatctgtttgcccttgatgggctgatatcatgtcacttccacataggctactttgaggtatgtctcgacactcaacaaagcttccttcactgaccttcggtcggagctatattgcaaaggcctctttctcactcttctatagttccctaaccactttctggtcactacctaatctgagaagtcatcatagcccaagtccgcaagctcattcaactcagcattcatatcctttgtctcaggaaccgcccacacctgcttctcccactgctcggcagccagcttatcagccttggcctcatcgtcatcctcatcaccacgtcccctatcctcctcaggatcacctggacgccgaacgccctgggcccaagcaaaaaggttttgcggatcccacattttcttgacttctcgaagtgcagcgagactctccccatattatgcccgctcgtggaattttgtggggaagtctcggtcaggaaagttgatgaatgccgccgtcccattatacgacagcgtccgaagctccttcttcactctggccaagaaacgcctcatatccaactccatccacttgtctacccactcgatcgtaacataggcgtggcacactgctttccgccagaagaaggcggaatcggtcggtttcctctttgttgctttgcctcccgagtgaatccatatgacgaggaagttgacctgttctccgtcaaactctttgcggaaactcgccatcaacatcaaccgtataatggtgtcagaaaccttctctatggtgcccttgtcatcatttccgaaaacaaaggagctgtacagctcgtacgtcttgttctgtggatacgctcgctccatttcctccaaccactgacttgcgagggtttcgtacagataccgtgtcgacttctaggcgagcgcccttcgttttagctgctccttcaagctcttaacttcctcctctacagtatcattttctgtgggtctaacttgaagcagcttctcgatggtcctgtcgtattcactcttgctgccgttgaaagagatattgaatctgaccccgcccttgtttgactgtctgaggtcgcatatccaagtcgagtcaatcgtcatcttatccggccagtttgtcaggtagaatgcgttcattaccttcacgacgtcataagtaatcccgcctgtgggaaaccactggtatctcccagccactacaaatccgttcaagctgctcagcttccgaaccctgagcttcatccgcaccacaacaccaaagcaggcagcgccagcgccttggagagcccaaaacagcctctcctccggggaccccttcttggacgtctctctgaccgtgatcaacctcccatcagctgttacaaccttcgcctccacaagcgtgtcacaccccatcccgaagcttcgggtaaacggaccaagcccaccaccgaggatgaaaccactcacacccacagtcgggcatctccccccgttgatgataaacccgtcgtgtttcccaatgactaacgtctcatacaccatgccccaccggcatccagcgtccatggtgacgatcttggagtccatatctaacgatgcatttttcatgtcccgcaagtcgagagaaatgccctcgacagctgtcgagtgaccggcgtaagaatggccattgcacttgactgtcaccttgagcttcttctcgcgcgcttggctgatgaccgcctggacttcggtggctgacttgggtcggacgacgcaggcaggcctcgaaaaacggcgcaaaaggttcgagctggcaatcgcgtgtctgtactcgggacttgcgggcctaaacacagttatctgttgtttctcgagggcttgaatagcttcttccatcctgctcattttgtccactcgctcagggccctggaaggttgcaaatatgtgcgagcagtcaaggacttctgtggtattgctaatggaatgtatgaaagcagaatcggagatatgggggaccgatcacgaatttcacacctgttactgtcattagtacgatcagtaagacaagaaccagggtaacatttccacttactgtcgcgaggatacctggcctccaccaacctatttccacattccactattgcgtttgccaactcgtccttgtcttcgcccgaaggatcaccttcggtgattatagaaacaaggagcggtctcttcagagttttggttgcgagtttatcgtagaccagtggctgaaggattttcgatcttagattgatcccgatggcagtatcgccgtttgggctcatggagttcagaatgccaccgagagacctgagatccaagttggaagaattgttcgcaccgacgtcctggtcgatgaagcgcaatgcaacaccctcgccctcaggaagaagcttggtggtaatttgggcaatgcgaagagcgagtttcttctggctctcccaccggccctctctcttggttgacgaactgtcgtctatgaatggtcagtaaagaggcaaagatggagacaccgctgttagactcaccgcagtagattgcctgttggtacaaggtcagttggatggtcttgggcaagactcccggctgccccagggccgaagtcttgtcattagccagggagactgtctcccgagcaagctcttgaataaagccctgattgtctttgccaaagaacgcaccgagtacggggttttctttgacgtattcatcgacgttctcgataaactgtccctcagtcggatcctgggatattttgttgacttgctgtaagttgccgtcagtcagtgtgtggccaaatctcaggagacctgttgcttttcccagacctgtttgatggttggattagccgtgctgaccattccagttgctcgatcgatagcaccattttctcgctcgtggcgttcgatgtgggcaagtactttgcgacctcctttgcattaaactcgtcattgctttttatcgccgagtccgcccccgctcttctgagcattctaacaaccttgagatcggcattggatttggtcgtggaagctctttcaatggcgtacatcagtggtgtcttattctcagcggcatcgcatgtgttgtcgacagaatcaggcggtagtttggagagtagcagctatcaaaggtgcctcccttgtcatcttccatgttgcaagcaggaggggtgtttcggcgttactggaacgctcatttgggttggcaccttcattcaggagtgttcggacatcatcggagtttccagtaatgacggcggtagcaagaggtgtcaaccctgtcttggggttcaggacaggggggtccattggagggaagggccatctgaaaacagcgaacctgtggccgcaacgtgagatgactggtagtaaggaaatgggcctctcgaacggcccggctcacaaatgacctttgaggagcctccagaagccacgagctagaccgaggcaagaaacatggcgatgcgcgtggaagagaccggggcagtaactttgcagaatgggccagggatgccgcccttgcaaaggatttgctggccattggagagagtggtgattctgataacggtgaaagacggatgacgagctgtagatatctagagcaggggactgttcgcacggacaagatatatagccgagtggccaatgtgcttggtattcaactgcacaatacatgattttcattgattaggtacctattgatcctggaattttgtggtttcgttgggctgacagaaatgacccccggagtctttttaagccacttgtgccaagaagccggtgttctagaatggcacgatgaatcgataagccaacatgattggtattgttgtggggtatgtagacacaccagggggtgtagtataaggccactgaagttgatcgtcacatgtaccttagctgttagaatacacgtgagctgcgtggagggtgcgcgacagcggcgtagaggagcggatgcgtgcgggccgtgaacagcctgtggacagatgagcccataagagtcaacgcgagtactgggttggaaacacagcgctgggttccaacaagtcgttctatatgatgaagaacaaggtggaatggtcggccggttactcttttccttgccaaggggagcctaaagagaggccactgggaaggttcttaacgagggcaggaacgacggaactacgaataaaattgtacagttttgttttgcttgtctatacaatgtcaacacgtttttgatgccgttattttgtctataaatgcgatgctctgtgatggcttcttattccctctcctgtgataatcccgtctccgacacggaaactccacatacttaggcggtgtttcttcctctgtctcaggagtatattctcccaactcctccccagcttcttcgtcctcctcaacacccctcttcatatactccaccaactgcgacagtgcctgcctcgacaacttgtgctccacccccaatctcccttttgctcccacccaacactcccgcatcatactcctggcctcatcacaccaccccaaattccaccgagccaacgccaccaaaaacaaacttcgaagagtatccacgtgattctttccatagaagattctgtcaacctcccactttcttctctgttcgagcaccgtgaggccccgcttctcttcctcctcccagtttccatcttgaaaatagcaaactgctatcgagtatctgatcttgacttcatactcgaaaggcttgtcatgctgcgggggataagagggatcagcatatctgcacacctccaatatccgttccaatatttccatagcttccccaaagcggccttgtctcctttgcagaatggcagagagctccaaggcaaaacacaacccatgtggtttccaatcgtttttggccttgaacacgacttcccgaaccttgatcatctgttctttcaaatcatcagcgtcttttggccggccaaatcgcccaaccgaaagataggtctccgctagcgagaacgcacattcgagcgtgagatttgacgtctccttgaagttatgaaccaaagagtcgtagcattctctgagtacctgcaccgcctccgcactacgaccagctttgtgtagtatttcaccaacaaggcgctttgtcccgggcgtgtcgcgatggctctcacccaggatattaacttgcagacggtggcaatcttctgccatttcaaagggccttgatgccgcaacgccgaacgcttgataactctcagcgatcgtcaattccgtcaaactgcggagtgtatcagggtgatcttctccgtgtcggtgtttgtaacgatcgaagacatcttgagctagccgcttccattccggaaggacggaagacacaggttcccgcggcatgtcaatgacagcggtgttacctggctggatgcagtaaacgttcttgctgaattgccaaagaaccttgatcgagggtgcatcacggcgtgctttgaaggagtcgttcttagagaggatgtctgatgtgtcaatggctcgaaaggcgtcccggacatttgtccacccattgatctctcccgactgcatccaaagtctgtagaagacaaccattcgttgcagaattctgagctcctggtcactgtcatgcccgtgaagtcgacccaactctttgagagccatggcaaattctcttgctgcgatgacccagttttcataatgacgataggtgatgttgagcatgatccggtctccccacattatgtcgtcccagagagcaccaggaaacgcatttgattgattgcagacgagatctctgatcttgtcaagctcggcgcgggcaccaatatctttctgtctttcaatctgagtaagttctgcttggtgtcgagctttgagggtgcgaggatgcctctcgcccaaaacctcttgataaatttcggctgacgttcggaacatatcctcgacttggtcccatgactgacaacacttcttgagcccataggaaaggcagtaaagaccatacttgtaccgaaaactggcacaagccagcttcgcatcacagctcttgggaaaaagttccacaacgttcttttccagacttctgaagtggtgatagaggttcccacagtcagtctggtccaacatgctaattacttctgcaacgtccggaagtattgccgagacacacattactgcatgttccaagtgcgggagggcttccaaattgcgtgggtcctgcagcctttcttggaccgacagctgcacctgcaagtacatcctgaacgatccatcatggtcgttatgcaggcagcagaagtcgttcagagctgccagagcctcctctagctggggtttgtatagcgcgtcccacctctggcctctgttggcgaagcggtattcaaaggagagaaagccttgggtcgtatctctaacacgctcagtgggcccccagagtcttttcggaaaggaaaataaatcctagatgttttccagtgtcgatttctactggttttaagcgtcggaagagtcccggtagaaaaggtaagctagcagtggtgtttctgggatcgaattcgtgccaaagaagctcatcagaaagaaaagatcgagtgcaaaaggggatcgcctctgggcccgaccaacacatgtctgctatctcaaatccgaagcagacctgcaaaagagataaaatctcatctcctgattcgaccatcctgctccagtgctcacaatgactttaagccgcttccatataactccaaaggtggttttgtcaatgtttgcagttacggctgcttgagtaatcgacaatcgcataccacccagccagtcagagattaactccaaacaagactcgctgtattgatcaactcttccgtcaaaatgttttttaagcagctccactgactccgttgtggataaagaaccgacattaagtaaaataccagattcgtttccttttaggagcttggaagccatgctcttgccctcagtggtgaagacgatcgtcccatgagaacaccggggtagcctgctctcaaactccgcgatatcatttatccatggcatatcgttactttgattggcattatcgattatcatgatccaggggccgttccgggcgtcgttgagccatcggaaaatccaacctgtgcattggttggtctaatagccgggaatatcgcatgctcgggccatggcgttaaacggactaatgaacctggaaagcccgtccgaaatgtttacccagtaaaccgagacttccgggtgtatctcacgcacaacatgagcgtattctatcgcaatcgctgtctttctgacacagagattatttctctgtcagcaccaacgagcaccaactcaggagatgcacgacgactgtaaggcaaagaattgaacaatctcctgattgagggagtattcttcggcctcgattgtggtcattgtgaaaggtgaaggtggacttggagaatgtgtgagatgatatgcggaatggaatggaggaagaaggagatggagatgggagaggagaattcacgggtaacaggcaagaaacaagctgccttactggcgccttgttgtattgcgaatgtgaggcttgggtgttctgctggcacgcctgaatttgctgaaccatcccgctgggacagccagcccaatgggaagcgagccgccgtaagttaatgcggcaagccgcttgacccatgtacctatgctctttccccaatacatgcttggccccccaaagttggctagagatttccatcaaagtggtcttcggattccgtcgaagccatgcagaaggttgagatgtaggattaatgagagtttggccaacccggcgaccggaatggagatgagaaagctgtattgagcatggatgctgtgagacaggtgggcggtgggcttttgttggatgagatggaagaataggagcggggttggcaaggaacgagagagaggtatctccaggagctacctacacgccaattcaaggatctattctcattacccgttaccactacatagatatcttcttgagatcagatggcaaaccttcaccttgtttcacgatgctagtgggtgtggacttacacctgataggctcgcattcctcgcatcaaagtgtgcattgcattcccccgatgagtcaacggcgagtaaccattgaagccaaatcctgcaaagcaattggaccaaagcccgaatggctctttcggttgttcaaagcactctcaccagtaaccctaccatcctgttcataaataggggtggctactcggccttctatctgccaagagatcaacaacacaattcacacttgctttttttcacgatcatcacccatagccactgcaatcttgtgttctaaactgagaccatggccaaccaaactatcgaacccaccttccaaaccgccatctccgcctccaaaattaacggcgtcatcatctgcgcaaccaacaccaccggcagcttcacctacaaccacatcgccggctcacgcacccttctttccggtgaatccctcccccaccaactcaacgacatcttttacctcgcctccgcaacaaagctcatcaccaccatcgccgccctccaagccatagacgacgggcacctctccctcgactccccagacacaatctcccaattcgccccggaactggtcaacagacccatcctctccccagacggcgcgaccctcacccctcccaccaaccgcatcaccctccgccagttactttcccacacctccggcctggcatatcacttcctccacccttacctctccgcctggcgcgagaagaaccaagagcccctgcaaccaggccaccgtcgcccagtagaagaagcattcgcttacccgctgatctttgagcccggaacatcctggtcttatggacctaacctcgattgggcagggcgtatcctcgagcgagcgacgaataccaccgtcgggcaacacgtccaggagcgcatctgcaaaccacttggcatcccagcacaagatgcccagttttaccccgtcgagggtgatgaacccagatctcgaatggtcgaccttaacccctctgacccggaagggctggggttggctgttgtgggggggacaatggatatgaacaggcggagtgagggggattttggtgggcatgggatgtttatgagtgctgaggggtatatcaaagttcttcggtctctgttggcaaatgatggaaatttgttgaggaaagagacgggggaggagatgtttagggatcagattggggcggagggggaggagaatgcgaggggggtgtttgatggtcctactggcatcttctacagggttgggacggagggggtcaaggttggacatgggttgggtgggttgttgactttggagggggtggatgggtggtatggggagaggacgttgacttggggtggggggttgtcgtttgcgtggtttgttgatcggagcaatgggctttgcgggttgtgtgcgatacagccggcgatgccggttgatgtgcggagtctgtcggatttgaagaatacgttcaggcatgatgtttataggaagtttgaggagtggaagaaggaggagaagcggaagttgtaggtaatggacaggtacctaactaacctatgtgcatgccgctagaaactttcccacactcacccgccatctagaccctccgcgtcttcttccccttcttccccttgcccgcaatcgtactcggactagtcatcctccaaagatcaatctcgattccttccacttgcccatcctcgtccaccaccggcgtagtaatccccaccgccacaattccgctcagccacccatacggcgtgtctgatccagcctcaaacctgaccctagtatgcaacacaccctcaggttgctgcgggccgttggccgagacgtagatgtctacgccatcggtagttttcaattgataccgagcgtcgacataaaagttgcccacggttggattgcccagaccccagtcaccctatagaagaaaccttgtcagggtgcatgaaacggcaagacaagaaaggttaggtgcttactccataggcaggaacggtggcattgaagagaggaccaatgaatgtcccgccggcaagggggaagacggtacggctgccaaaggtgctggagccgatgctgaaaggggcggaggcggcgatgcttgcgtggccgaggtaggagaggcctggtgaggccggagtggaggctgtggcaagcgggaggagagggaggagcgttgagagcttcatttttgcgtgggttattggtgttggaagtgatgagaatgcgtgtttgatggttatctacctgtttacgatgttggtaaagaagttgggagggacaagtgaggctgtagttatacttctcggtcgccagtcctcgagccagttgccaggatggcatcacacctcagcaacaaggcgagctaggtacataggtatagtctagtaagctacacgctatctcaccagggtcatcggaccgacgacatcacgttcaagatgagtatcattggaaggtgctgtttgtattcatcatgccaagtgatttataacgggtttcataagcatgtctactgctttaggaatatgttaattccttcgctaaaaaaacatatgcagacacttattcagctctcgcaccatcaactggtgacagacagggtctaagtccgagcagattatcgattctgatctttccccatgaggcccgatctctggagattaacagagtagaataccaggtatgaacggtggtataaaggcccagtttttgttacttgttgggtgttggttgcgttatgatagctgctccgatctctctgcttttctccacctattgccacctctcctggacaaagcgctcattttagctgtgtttacagcaagttgtgtttgggttctatcaaaggatgatcggatttgttacgtttactggacatctagtgttcagtatcaagtgttatgtacctgtgcagatgattgggggggagaattgaggtcgaaccaaccgaggctgctgcgccacattgaggattcgagtttgacggggaaggcgcagtaggaggtcaacatgggcgcaggtgggtgttctgcctgaatatgcaacgaaccacatgtgcctcagtcgtgcagctaacttccccgccagtctccacggatgacctctacctgtcaaagcatcaccgcatgtgcgatactcacgctgggttgtcaaacatccccgatgagacaacatggatcccctcacctccatcagcctggttgccaatgttgccgcctttgttgatttcggcttcaagattgtgtccgctgcccgcgaggttcaaagttccacaagtgggacgactgctaccaatgtcaacgctgaggttcttactatcaactttaggacagtcgtcgcaaacattaaaggttctcggcttgcaggtaactctcagttggacgaggcgaggttagctgcgcttgttgacgaatgtgagcgtctatcggatgagcttcttggcctactggactctctcagggccagaaagccaggctcaaagagacatgtgttcgtcatcgccttgaggaacatgatgaaaaggggtgaaaaggaggcgttggaagcgcggttggatagatgtagaaatcagctgcagctggaaattgcccagcgaacgaggtaaactctcgtccaagccccgtatcctaccacgaaacatgagtagctagctgactgatggtgtgcagtgaaaagtccctggaacgtctggaggtcattgcggcaagtggtgaatgccaaacaaacgagctcgctgtcatcaaacgtagcttgcacgatttgcatcagctgcattctaccacccaaaccaaacttgattcgacctcatttcaggggttgaacagcttactgaagctctgcgggcaagcctttgaaaatgttgctctttccaagctcctatcctccattgggttcgagaaaatgtctgatcgacttgaaaatatcgccgaggcccatgcaacgactttcaactggctagtagatgcttccgaggctgtggaccccaaagcatcattgggagatttggaatctttagaggcccaagagtggctacgctacaccgaggttcaagattcatatcgcaaggtgtctcgggaggctctgacatcgtggcttttggaaggtaatgggattttccacatcttcggaaagccagggtcaggaaagtccacgttgttgaagcatctgctgaagcaccctgctgttcagaatatgcttgaagggtgggccggaggcaaagcactgatcaagtgctcatttttcttctggaaaggtggctcggttggccaaaaaacgttttccggcctttaccgatcccttctctgttcggtcttcaaacagtgcccggagctggtcccatcaattttcccatcactttggcaactgtgtttgcagggtggaaatgctcaattgaccgacgctgaagcgcgccgtgctttcctcgagataatggagcgagacgaagtctttacacaccgaaaatttgcattcttcatcgacggcctggatgagttcgaaggcgatgacactggcttggttcgtacctttctcggttggacacggctcagacccgacaacatcaaaatctgcgtttcaagtcgcgagcttccgctattccaagagcgtttctcatcgtatcccaagcttcgactacacgaggttacaagtttggacattatgggttatgtgaagagtacgctcgaagagaatgaagacttgtcctcggcagtcgaccacagcctcaccctccatcttggtcagaagatcattgagaaggcagaaggagtgctgctgtgggtatcattggtcctgcggattgttgagcgtggtcttcttcaggaggacaaccccgaagacttggaggccaagatcgatggactgcctacagaactcgagaatttgtttcaagtcatattcaaagcaattgagacagaggctcaccctattgacaggcgtagggctatgctcactctagctgtttgcttggagcggacatcttgggaactatccaacgtttttcttcatcagctatcctttctggatgagtacgaatcagattgcaattttctcttcaagagtttacgccaaacagagactattgaagatgaagaaaggctacggagatgtcggaagcaagtcaacggacgatgcagaggacttgtgagcgtaactgcatcaagcactgacgaaccggacgtgccaataccgacaagaagagttgaacaagttgcaattacacaccgctccctcatcgaattcttttcgaaaacacaggtccgtgaagttatcgaggctcagacccaaggattcaatatgacacagtttactagccgatctttcgtggctcagcagatgacagaaccggatccaagttcgatagaagaatctcacctccacttcgacattcttggactcttcaaggttgtatggtaccatgatttcatgaacacatccattgtgacagatgtgcttctagacttgcaaaaaattccctttctttcatccccactcaaggtctcggggagtgaaagttatcggccaatggactatgggtggtcgtatctttggagaaagagagcggcatgccgtcgtattggttcacataaggaggatcgaactgttgctgagatcatcattttcctggcgttaaaatatgggctaccagagctcttaaccccacccgaggtgctcaagggaggggcacttgttcaagctgctcagaagattgggccgcagcacctactaatgcgtatgtttgacactttactggcatcgactcaaccctcttggaatcagcttgaactccgacagtatgaccgccttctgaagacaatggccatgtgcctacgagatggggcatcaccaaatctcccagtcacttggcaacaaaactaccctttactagatcggttttcaggaaggatctcaagtctgtgggaggtattgatctggacaaccttgtgtgggtacgatcaggtgaacggaatgcaaatcaacggacaaaagcgcattttgacctttttgcccatctgggttctcttcctggcttatggtgcagacaccgagttcaagctcaaggtcgatactgaccacgcagtatcactttaccaagacgctattcgcattgtcgcgcttttcggaaaagaacaagaggaccccttcacgccgctctttatcccgcggctacagaacttggtggtggacatggcttcgaaacaaaacgggctcctcagtctctccgatatcaccagcttactcttcccggataactttcacaagtttgtacctctgctcgagcaacaagggagcagcgaacaagacggggaggagaaacggtgcgcagtgcttaaatcttttggactggatttagagcactgggatcctccgccaccatcgccagtagtcgcagtgtttccagaagtctttggcttgtcgattaacaagtttgtactagaaatgttgggcccttatgcggtggacgagccgcagcgggggattgtggtctacaccaaacagggtattgaacttttggaccgaaacaatccagcacatgacctagtcgacattctcgaataggagatcttaccgcacgaacaagagaaggttgtatcatatcatccaccgaccatgcaccctaatatcctccgccgccgtcgccatgtccctcttcatccacgattctaccagcaccctcaccccttcaggcgttagccaattcagcccccatatcaaccggacaacaacccaatacgccccccaaactgcccacccattcggatcaggcagcccaaaagcaaccctaaacctctctggcaaccaaccagccatcaacaccctcataaccggcaaagcccacatcaaaaaccaaggcaactccatccctctcagcaaaacatccgccacctgcttactcgcctctataatctccaatgattgcaactcctcattaaaatacctctcaaactcccccaacgacccaggccacatctccagcggcatatccaacgcggtagcaaacctcccaaactcctgacatagcacctctttctcctcccgtgacatgggtttcctctcaatcgaaaacagctcgtgagttttttggccagcaacgaagagggtggctgctgtccatttctggaggacagggtcattggcggtgtaatttgggccgtggatgtgggagtcttttgacctgttagcagggatgggacaggtaaggtgggggggggacaaacgttgttttttgatagcattgcagatgagattgcgttgttcctcggttccgtggaccacggcaatgatgaaggctgcggttcggcggaagcgggagatggggtgggtgcggaagcgggagtgggtgcaggagccgagggcgatgctgggggaggcgatttggaggaggatggcgtagggtccgccgagccaggttatgaggttgccgcaggaggtcttgaggtggtcttctgcggttggggttgggaggagagggactttttcgttaacaggtggtggtggtggtgggttttggggtatggtgttggacatggagaaccgtgggatataggattgagtattcgagcaagatggtcgtttcttccttgggaatgtgctgtcgttgagtgggttctctgaaggttggctgtagtttttgcttcgctggtaagcttgcgagccgaggtagtggattttctttgtttggcctttttgtatcagcgtcatcatggtattttacatcattttgagcatacggaaagggtccctttggctttggaaagcacatgtctgtgtctggtgactacttacctacttatcacggaaatctatcttcagctctcaggaggtccggacagccccgagaagtaggcgagttgcatgcatgtctcaccgtaccacccaccatcactcgacatcccaggaagcatcgtgattcgataacatcacccgaaagatacctaaatcagcacaacatcaacgggctgagtcgcgtttggacttttagagctgatatccatcctctgataggcaatactgtcatatgtggaaaaataagaggtgggttacatcggtcagtcccatgtcagcatgtgccacatcgggaggccgcaggtaggtaggcactcattctgaaaaaaatgcatgacacggttgttctaaatacaggggcacatacgtcgaacatgcaccatccatctacatggaatgccatctgccaccatggctggaaaggggcgcacaccttgaaactttgaccaacgaggatggcctttggggaattgcagttccatatgataccccgggaaacttagctactgttttgtgtggttgtgtagggtgtgaagcgcgctgctagaagatacgagggctttttaagacgatgactgacttgccaataccagtctaaagggctgacatgatcgcgagtgtgacaacatcaagtcaaaccaggccaactccgttatcctcttggagcggccagagcaagatcttttcatgtatatgatatatccctaaccctgtctcacgtacatatcgtagacactgccgaaagggaatataccagctgtaagcattgtgataagcgaagtggtcttcataatgggtcaggtgcgctccacgcaacctctaagattgatctttaaagccaagccaatgatttcagttggatttgtatcaaaaccacacgggacggggagcaggtggtgattcggataatcattcggccgaacaccgatcatgcacacctgcaatcacaataataatggagggaagtaatgtgtgagaagacattgtgctagatccgatggcaacgatcggctgacctcaagctggcggcgcggtgaaagctcaactttcagaagaatctcgggctgcgatggcagcacacgctacgttgcggtgcttgtacaagatgaaaatacaacggtagtcgagctagcaaagaagtcatcgccagggcgcaggatgcgaccaaagagtcaactcggcactggaagcagccctgggacaagaatctgctggaaaatcatcgcacagctaaactccatcgttctctcccggaaccaggcatttgtctgtttcgatgtgttcgacgagggctgcagcgctcaaacttagcagagattgattcaagctgcgagcagcctatacattttatccagaagaggggagaccgcctttttcgtacgacgagaaccccggcatggataattacgtcgcaaagcgatcctcacagatcagagcttggactcatggccccggccgtacttcatggacggaaataacccgccggtatacgacaatggacgtcgacttgaagcatcagaaatcgagggattactcaaagatgaggattgtgccacagagaaggactatgatgatggggaaaccttgccatccgtggagggcagatcccagaagaatcctgataggctgatggaaggttggcgagaccaacgaggaggggaagcaaggatgacatgttggccatttcgcagcttgggtcaaaaaggacagcaaaagagtaggtagacacgaattcgtaaggatcaacatttttggcacgtacctcagtatgttaacggcctacggctgggtataggtgtaggttataggtaaaagattgaattgtccgataaagaagacaagagaggcaaggggaaatacactgcctacaacgtcctcttaagtcttttaaatcctcccgacttcccctactaaacatagaaaacatctaccaaaattatccaaacttcctcgtatcccttccttgtatcccttcgtcgtatcccttcctcatatcccttcctcatatcccttcctcatatcccttcctcatatcccttcctcatatcccttcctcatatcccatttgacttgccgcctctcacgttactgtaaggataaaacctaaaccgaacatcatcccataatacagcagacagtgagacagtatctgaacgtttagctggacttttgcatagtatttgtttggcatctcatcgagtgttctccacagcagtataatgtttttgtcaggatatcaccagaccaagataggtaggtagataggtagatatataagtcaagtctgctcatttggcatccgccgatccggacagtccaatcgtaaggtagctcattgaacgcacattaatcgacacactgttataatgaaggggggggtccttcggttgtaatcagaggagagcctccactgttttctttggaaatgccactcacactacacaacacctattcgctatcgctaccactttcgctggtagggggagtaggataggtgcaagtaatgcaccaaacagcgttatcgtagtagaggctattgtttggagtccccgcgtgtgggctcgcggcgtttcgacgtctgttgcaacgagttactttggtttgctggatgaagtggcatcgagagcagcagtagtagtgcttgtaggtacacatggctgttgaattgagaagctgggacagctcgagattgagtgcagaatggttcaactggcccggacagtgtagaggaaggcaagaacatagccgatatgcccacttactgtgcccgaccatcatttctggtgttacattggcatgaattatggtgaagccttcctacctctcttttctgcagtagacgcggcagccttccctatggccctatggcgcacatccgtcgactaaggtggttacctagcaccctaagtgtagccctgtgctgttcttaaggtagagaatttagagccaatgaattacatgagccgacatcctgcagattgtgatatgccacccataaatataccggcctatcattcaccaagaacataccgaacatgcaagtaaatttgaagtgagttgagacacggaggcaaggaccgctttcctcccccctcccgccatccgaatcccatgtggtcgcccagccaattcatgttcctggctcttaataatcaccaccatggatgccagctgcaggcccaagtctccagaaagtgatatatctcaccagtactctggctacgtcgcgaaatccataccccttgcggacctcaattgtggagaggaacgatgttaccgttcatctcagaatcatccctgtgtaccaagtaggtacctagccaagatacttgagagcctaggaaatcttggtaaagggtcaggcaaagaactcacagcagagaatgattgcaggctctgtatttgccatgggattatgtatatacaatacaacaccatcaactaccaacgaccaaatccagcacgctcctttgggggaatagtttgaaacaacaagaccaaaagacaacacaactccatcccaacaaaattaccaatgaccaaccaaccaagccagcagcggacccagagacctgaaagccgctcccgctacatgcaatcaccaaacccaacccgtgtcatcccattcatgatgtcaaaagcacacccaagaaacttttatgcctcacacatcatttacagctgagccaagagtacagcagcgccaaagagggcggccatgccaagagcagcaccctgagcagcagcaccagcctcaacaggagtgtcatcaccgttgccgctgtcagggccagaggtagcagtaggctcggcaggagcactggtgggaacagtgatgccagaggtgaaggggacaccgccggtgctgctggcgccagagaaagcgggagcctgggtggactcggcagggttgggctcagcgtcggtgttggaggggttgaggacactgttgacattattaacacccatcttggtccgtcatgatcatcggggagacttacccatcaataacatgaataaccccattggcgcaaagcacatcagccttcacaaccctagcactgttgacaaaaacgctcccatcctccacccgaagcgtaatatcacccccctggaaagtagtcgccgtagccccgtcctcaatctggctggaataaacagtctgcccgacaatgacgtgataccccagaatccccgtcagctgctcaacagtcagctcgctgaccaggttcccaatcgcatcaaacgccgcgttgttgggggcaaaaagggtaatgtcccgcgcgttggtgagcgtctcggcaacaccagcctgcgtcacggcgccgacaagagcagtgaggttttgctccaggagggcggcgggcaaaggagcggggatagtgaggtagttgtcgatgatgtggatggtgccgccggtgtagttgaagttggcggattcaacagtgctgagctcgccgtttccagaaaggaagctcacgccgccgtcagcggcctggacttggagtctctggccgccggtgacgttgctgtacgccgcgaggtcgaggatggtggggaggaattgggtgggggaggaggtgaggttggaggcgtagaaggtcccgttgaggacgtgataggcgaggaaggcggtgaggtagttggggtcggagaggagctcgttggccagaggggtggcgttcagacgggcgagggcctcgttggagggggcgaggagggtgacatcttgggcgttggcgaagagctcgtagatgacctcttcggactggaggaagctggtgagggaggagagagtagccgcgttctcggcgaggacgtcggcgagggtttgggcgttggctgccgaggcgagacccaggagagtgagggtcttgagctgcatgttgggtgtgtttgacttgttgtttctgaaagagcgaacgagagtaagaggaaaggggactcgtcaggagtgatggcccggtggcgcttttgaacggtagaggcgggatgtagattgatagatgtctgtctgactgtctggctgtctaaactgtctcgaacaatcacggggaccacgagactttaagctacgccggttgacggcgatgcatcgctcggtttcggcgcatatccaaaggctcttcctcatcagtgcctgaccgatctgaacatccatctccaacccttgctgcatcgacgagccgcatagaacatgaggcattcctgcaagggctcccaacccgaatgcgagtagtcagactccaacaaaacctccacacctctagagccaagcttggcatacccgtcaatccacccctgacaaagaacagcagagagaaaacatggagagaatgtcgtcactctgcagcggtccgttgcttggcagctcttgacctgtaggatgtgaggctagtcggcacgtttgtatccatccattcaaaaggtcccatcttcggcggaagactcaactctcgaatcgagaatcaaatacaaatgtcccgccctgccgaaatcacgtcagtctcaaccctcgaccgcacatgagcgagacgatgggatataatactatgaaaaactctgttgatccgccgtggtatgtaagtagaatacgcgtccctgcattgctctacaggtccctactgcccattcacatcagtagtcaaaaccttgtcttcacaactagtattccgccgactcggcatccaaatccccccggcatcccggcctcggtcccaagccgaccaagccgatccagaacctgctttcatcgaatgtttcttccaatttcgattgccatgtctgaagccaagcgaaaacaacacggtaaacaagttggtgttgaaggaaaaggaacaacacagccccgatttcaccagatggcgacaagggtgcaaatcccatctgcgatcgccaagcttcggatccggggcagtcttgatcgctgggccgcgcgccgattcgccctgccgcacgggccctaagcccagtcaaacgggcgctaaccctttacgcatttttagtggagagctcactgtggggtagctgggaaacatgaactgacgactggctgcttgggaacaacgcagcagctcagctcagctccagcaaattctccgagggttgctttgtaagtcttgacaaaagctctcagagctccttcataacggctgtgtcattcactgaccgagatttgctggctcatgaaacttgccgtgtttggttattgataccaatgaacgacagccaagccacccaggccgtgtcgcccagagaatcttctcgatggtggggacaacagttcgatcgatgcgttagctgacatttgctgtcaaacatgtcgtgattggggatggagcttggcggtgttgtaaaatagggaagacatctgctggagccgtgaacactggctacagccaccctgccggtgacttgggtgccgggcatattgccgcctatgagaggtgatgagtaccctgtgtgatatctcctgtaatttatgtaggtatatgaggctgtgggtttgtaccgtagctatgtgtttgggtagtatcgtcgatgttgggtgcaggagtcaaaggaagtgacaggcggcgggtctgggaggttggttgagcagattgcctcggtagtaggacagattcaagccgctcaggtgacggcgcagtgagaaccttgatagccaagtcaaaagagaaggcacgacagaaggaaggcacggtaagaggaaaccacggcagacggaaggcatgacagaccggtactagttgaggtctcaccagatgagtattccattcccactcagcaaggcttgcagtcgcccaaacatatccaatgtctctatctctagtctccgatcccaagctcgatataaacaaccttcgaaaagcacgccatgctcacaaaacacaatacaacaacccacaaacgtcttcaaacgcccaatgccatgataacaccatcaactaatcactcctccctccgcctcaaaaacagccctataagcgcccgttgcttctcctccagcgccttccgatccttgtccttctccaacaccgacccccgacaaaccaaccccccaaacacttccgcaaacttcctctccttagccctgcgcctgttgagagccacaaccgcctgaattcccggccccgtcgacctcctgaagctgagagacttccggcccaatgcgactaggcccgggcgagatgcggcatcgctattcttgatggcctccagatcagccttggtcagaggtgccagctcggcagctatccttgcgagtgtcgtcgtcaagaatacaaagcagatattgtggttgggagtggtggctagaatatcgaggatcgcagtcttgtcgtcttccgccgagggggcatcgactgctgtagccactgactgtgccaaggaaggcagagctgcttgctcgatgcggttccacaatggcgtcgtgataaccccgtcgaccaggccttcgaggaagaataggaaggcttcactgactgcctccaggcgttgaatagacggtacttcgggagggaacacggaaagaattcgctcgtctcgatcgagggcatcgatgacactgatgacttgggcagtgcgcgtctctttgtcggttccctgccaggtggcttcctccaaaggccagcccggagcggtgggaacttcacagtcgtccaacatctgggcgtcggcgatggctcgctcggtaagtgtctccgtagcttccgtaagctcgaacaactcctttggcgcagcatggtgcgctggtaaatcgtacggaatcgcgccaaatttcccattcttcttggctagagcattgcagaactccctgatgccaccggtcctaacccggatgagttcctcaacagagcgtccaatacatgatggtgcccaatcggcatgaactggaatgaagtgatccctgccgtccataacacgcagcaccagaacctcatccagggtcgcctcgccttcgttgagcattctagcttgacggacggtatcgatgacggcctctagatgtgcattcaccgtctcgccaggctccaatgtaacccttttcccaagatcaactggctctgagccatcgtcactctcttcggggcgaatgaaggacgttgttagccattcaaaattcccagcaaggtctgggccctccgttgaaggcttctccacgaaggcaaaggtagctggtacactaccggtattggccaaggtaagagacgatgtcatcttctccaagaaccttactcgtccgaaatcgatggccagctcgggcctgtcggagacattagactggctgcgcgggcgagaaccctgatagtcaacgacaatcgtgactactggccgtccctcgttctctgctcggtcaagctcgcgcgcaacctcagcatggaccttggctttgagatccgggactacagcgtcgcaatctagtgtgaagatggagcttataggcttgtggtctgatgaagtgattcgctgatgggaggtgtacaggtcaagacgcagttgctcaccagtttcgccattctgttcctcgtcatcgtcgttctcgtcgtaagcatcgtatggcgataccgaagagctgggctggtcgtcaccgtcgttatcgggatcgtaagaaaataggacctggtcatcatccgcggcattctccatgccctgggccttcatctcttcgtccctcttccttgcttcatcttcctcgcgcatcttcttttcaaaagcttccctatcctcccgcgtacgaaacaggatgcggtcgcaccaacttggagggcgttgcttttcgctagagtcgaacagggcgacagtgccgacgtcatacttataggatggtaggaacctgatcggaccctcccgccagccttcatggaacactttgcggtccttcatcagccgtctaagctggtcgtggggcagtaaggaggtgattgttgtttgaagcgaagcagggtcttcgcttgggtctaatgggaactcgtcaggatcgggaaggtcgaaagaatcgtcgtcggcattgttttcgccagactccttcgagtcctgtccgatggtttccttcccggctgtgttggtctggtcctcatctttcgcatcctcgctactgtcagacaagtgctgcacaactactccttcgccttccaacgagtcctcgcgacgtaggttcttcttggaaacatcatattctccctgggtatgtagcatcagcaggcggcgaatatcgtcaccgggtagatggtccaaccgagagttgaggtctccgaaccaaaatgcaaaatcctcatctccaatcttccccttctcggcctcggtgatgccaccaacagcaattggttcgaagcgcgcatattgaaggacctgttgtacctgccagattcgtcgctcgatgtaagagttttcaactccgctggcaagatgacagttgacaaacaacaagttggtggcctcgccgagaacaatgcgtgcgcacactgctcctttgttgccgaggtatccaagcgctccagtcgcaacactagtagtgctaacattgctaacaatgggagcaacctcgggggaagcgtagaccaagagtagcatggccgcaagctgttccgtggcgatgagctggtacccatctggtaaggcagcccccaaagcagctttccacttgtccgcgggggtactgtctggcgcatagatccatgtcatgtactgagagggcgctgtaagctcgttgatctcctgaagtccgaggacataaagatcaatcttttcatgtccgtcgccattcttggagctcttgttcgtctccgtttgtgtagcatccagcccctctccgtccacaaaccacctggcaagatccttatccgtgcctgggcatgctgccacgttccatgttccgatcttgattcgtacccgccggcgacgtgtgtattctgaccgacgagcgtatactgctctcgacaaggagtgtgggttggtggaagtgagatcgacgggttcggatgtcgtggaatcagcacgggcagctggctcggcatccgagggctccatcgaggaggccaggtgattgtctcgatgggaaaccgtctgtcagttcaggcgtagaaaaccacgtaggtacgtggatcaatcgacctctctgttgctaaatcgcaggtcgaggtacaggcgcggttgggctggctcacgcatggagattaagtttcgagggtctttaatgacattcaagggtcgaatgcggggtggttgtatatatgggcgacacggaagctcacaggacaagctagcccagcaacgaaacacaaatttctatgggcgcatagtatgggcttcggagaaaatatgtctcaaagttgtgtataggcggaaagtcgtcaaggtactctaggtaggcaagtagatagataacatggaacaaaagacaacaccgggatcaaaggccagctccaggcagttcagggacaagttgctggttggtggggcagtgacgcattcaagatggttgcatggccaaaaaccccaaccctggagagacactgccgcgccaagagccccacagcggggatacaagcttcagcttcgggcgaccagcaacactccagatacaacgagcccatcatcaccaaccggacgcactggtccttcttgcggccaacaccctgtccggcttgattactggtcacgcctaccatattatactataaagagcatcttctcttgctctttctcgtgtaactcagataaccccagtgttcgcgactgtccttcgtccgatcttgacacccgtcgtccgatcctgtacgttcccgagccccgcggtggcacctgcattacgctctttcgaacgtgtacgagtttttgtgtttgcagtcttccgatatgagcaaggctacaccccgaaaggcgcgtcaccgccagcacccaagcaacagtggtccccgacagcaagtccatgcctccgactacgaatccgacacagcatactacatggagaatcgcaacatggctccccaagccccgtctaagacacggtccgatatggaggtcaacctgacagtcctccgccgatatgaccctacaatcaagtcggtgctcgccatcgctgccaacgctgtcatctacaccattggacaggcctctgctgggtgggagaaacacggagtcgaaggaacactgttcgtttgcgagcaagaaccccgtgccgattctagtggccaacatctgccacaatactgcatcttcatcctcaaccgccggggcatgaacaactttgtcgtcgacctcgcaaggattagcaactgtgaggtcgtggaggagctcattgtctttcagctggaggatggctatacgatcgatagcaacgagacggaagaaggcgcccaaaaggctattggcatctggatgcacgaggacgagactcgaccacggagcgcgaactttaccaccatcatgggcgcctggcaggaggctcgcaccgccggctcggcttatttgcccaccgacgatgaaggccagggcgctccggtcgcggtggccgagacaccagcgccacagaatgttgggttggttcctgggcaacagatcaatatcaacgacctgtttgggaataagtgaagggtatggataggcattctgcctaagctgggtctggggcattagaagcgtggggactttagatgctgctacagcgatctggcatggattatggaaacacatgcatggttaggcgttcaggtcatacggtatacaggacggtagcgactatcaatacggatatcatattgggcacggtgcgtttaccgtgtcatgtggccttttgacactgtgctttgcttcactgacttggccttccacacttcttggccgttcatgctttctttccccaaacatctacagcgccacaaaagctattcatttccagcaagacaattcttgattcttcacatgatgcagaataagtctgatgataaacacgacgacaactccgacctcctcgaaccttacgtcgaaacagagttggtcaatgccgatttatttggagagtggcttcaacaagaactcggcgatggtaaagatcaccagggcatcatctcaaaggtagcagcggcgctcggtgtatttaagaatacactacagtcgctttctctcgagagtaccctgccaaatcccaggttatggaacatgcaagtcgatgcagtcaatggtaacgatttgaaggtcatcgttactataccagggtcggaggaggagaagatcgaagttgttgccaaggatcaagacgaattgcagtttctcaaaggcgtaggtaaaactttgcctgttcatgcaacgccgtctaacactctacattaggacaaatgtctcggatacatgtccaaagtggttagttcatctggctcgaagaaacaatggcgaagctggtgatattgacaactacagtggcatggtcttgctcaatcgctcgatagactgaccatctacgcacaaagatgcaaggaactgaagacccaagaagcggaattgatgtacagttttccaacggcacgatgttttgaaccttcaagctcatatcaaacaggcatcctgcagaagctacagtgcagaagcacatcaatctgctccaggagtacaacgacatgaaagacattggacagcaagtcatcggccttatcgcagaaaacaagggagttcaaatcgggaagctctacgagaatggggactacggggtcacggcggacgactgaagcagcaacaatggccaatctctcttgactccccacccccaatcttcgacttctatcttatgtacaagccacaaatgcgttgccactggccccggtatgagtgatcaacttgtcgaacgctccgttgctgtcgaaaataactctgtccgggccgggagatccaccggtgtacacggcgtacgtcttcatgatgggatactcataccatggtgcaggggtggggaagttgaagccctcgtagttgttgtaccggtggggatagctgtctgttgactggttagtactgtctgttacgacttgaccagcacaactgactgatgttttggccagcaaggcggagagtgtgtcccttgttgcgggcagcagtgatgtgggacgtctggtagcaaacagtgccgcaagtgtaggcacaggctctctcttcaagcacaggggcagcctctacctcggtcgagaccggtgcagcagacacggcgaccaccgagagaatggtaacgagggcggagaggaactgaaatgattagtctcaacaggaaggacgctgggtgtccagtgacttacctgaaccattttgaccgatgaaaactatgtacaaatgcaagctcgggctcgtgggatacagaatcaataaatcaacaatcatgtatgaggacccagcccatctttatatctgtcctactcgcaacttcaacaactcgtaccaccaccaaacaacggcaacccaaccacatctggaaggttgtacaccttcctttccaaccaccgccgatctccctattgcatctcctgcaccccattcgatagcctcagctcattttcgtggggagtatccccttcaaaccgcgcttacctcgtcccatccgtcaaccgcccacagcttgtaatcctccccacattccaaaacactcaaagttcccaccccttggtcaaccctcttgtcgatgtttcgaaaatatccaataccacgcgcaaaagacccccatcatgattggcccactccaacattcagtctcatacaacatgcaagtaagtccttagcgccggcagatctgcagcaacatcacgcccaaccagcgaatcatcttggcaaaccagctcaggtgggttgcaaacccctgacgacggctacatagagctagagacgccatttgtactgatgaggaagttggccgatgtagtcttatcaaggttatcttgagatgttatcagccccttgataatcccacgtgggagacatgatttggtttttcggacttcgccggcttcagatattcgagtgatcactattgaacacacacatagacacacagaatcatgaggtatttccacacaaaaaattagtaagagaatctcattgccaattcctttgtctccattgaagcccgcaagggcccgggaacaatttctactccttactacggactcaccttactcacctataatcaaccccccactttactcacctcaaaacctaaaaacaatcgtatccgtcggcgtcaacgccaaatcctccggctccggcaccccctccacaatcaaacacctcttcgcctcgggcagcacaacctccccctcagccaccgcagtctttgacaaatccaactcagtgtactccaagctcaactcggtcggctcggcaatccaatactcgttggcaatatactccgcctcctgaatggaactaatcgcgtcctcgcgaatgttctcgataaagtcctcgtccacctcgtccatcgtgctgctcggggtagaagggccgccgagaaagacaggcatcgagtcgagcaccccgttggggccgtgggcttcgacgcagagggggcacatgggggagtagacgtcgcacctcatgtcctcgatccagtcggggacggtggggaggccgcagtttgtttcgcaggggaggaggacggggttggaccaggcgcaaaaggggtgggattcgacgtggcagccggtttgggattggtaggtttggcacattttggtggggggttagtgggttggaaaggggggtggttaagagttacctgatggttgttgaggagttatgtggtgaaatgagtaggtaagttgttgattttcttgctgctaatgagtgatggtagtcaagttcggggctcataggggatcttatatgcttttcgggatgggcctcttgttggcgacattgtgctattttagatgccggcttgctttgttgtgacccgctggtggtctttcacaagaaaggtttggttcagggacagtcgggagagaatggttttgtgctgtttggtgaaagacattgccgtgacaaaggtcaaagagttgggatgcataaaaataaaacagacaggtaggttgaaatcattcaataccgtgtatgacgaaagtaaatatcgctgttcaatgtgtctgtctgctgtccctcatgcaacgagggttcttgtggggagttacttgacctgaaagcctggactttgcattttaagagtttcaggaaaagagcacctctttctcagacgtttatccattgtgcctgcagtcttgacttgaattgacgtcacaatatccggtagctttgcggaagttaagccaagaggcgcacactttaaccttcttcgaagaagccacagaaaaagaaaatggcacgtaaaaactttttaaagggttggccattggttctcatcgctcatcatcgaatcactctcccgacatagattcatagcatagcaataccgtatgctactctacccgtgtcgcagtctgccaattcaaccatgtcagattcttgtggcgatgaccccttgcccaagcccccgatggagttggaagtcaaatgccgcaaagcccttgaaagatacgcagcaatcacaaagatggatggcacgagacacttcccttcagacattcaccgacaatctgccaacatcaggacgttcaacactcatgtcagagatcgtcgaacacgcggtgaatcatgctaaattgagacaattgagaaatttcttgttggatgccattctcaaaccaggtaccgcagctccccctattcttcatccccatctcgcaaatactgacaatgtgcataaaaagtacgaaaccggtaccacaaagctcgcctgaccatgacagccgcactggcccctgattttgaccaggatattgacaagcatatcgccacaatggccgaaaggtcacgccccaaaaaagggcgtcaatatctcagacaacaataccttcttagagatgaccgccgctgtatcatgactggttagtatgagagacgctaccttgcctccctatctccgcaagactaagcaactaagttccgtagcactatttcactgtattcacatcctctcttctacaattttcaactgtggcgacaacaaatccaccagagttagtccacctcaaggtccacccacctcaatattaacccaactgacacgagcctactgatccaggctcgtcaaagtacagctacgtggtgggccctccgtcggtacttcgacctttccgaccgcaacttccacccagatatcctccacgggcccgaaaataccatatccctcacgattgagttcgtcaaggagtaccgccagttccggatagctttggaaccaggagaaggcaatggaaatatctacacctgccgtatcatggatccagagacccggagcatgtctgtagatcattttgctccccaagatcagcccatcaccttgacgcatcatgacaacattccaatgcccagtagggaccttcttagaatacatcataccttgggtaaaatctttcatgtgagcaaaaccaccgctgaatctatgaccagagtgctgacttgtgtgtaggctgagccacgtttgaactggaacgtgatgattgaagaagcaggttgttgatgggatatattcagcatgtatgatcttagtatctatgtaacagcttccttgcgggatctatatggcttgatattgatggagatggatagctattcaagaaggcggacgccgagagtagtgaaatatacattacgcctacccaataaaagccaaaggaaggtgtgcagaaagaaggctatactctgtaagccattagccaacggcatacactgtttaaaccagcatcacctataaccataaccctaacccgtcaccccgtgcccccctactccctctccttcacccattccctcatgcacctctttctctcctgaagacgggacccaattttacactcaacctttctcacacacaaccctctactcactacccatcctttcctccccgcatcctctcacaccattcacaaccaccaactggacctttcccctcagaaaaggaacctccccctccgcaaccccatccaaatgcaaccccaaaaagttctcccctccaccaccactaacccttcccctacccaagaaaaagccaagatgatcatcaccccctaccataccaagcccgcccaaaatcccaccaataacacccaagcaaaacacaagcattcttggtaccggcagttaccttccccccctttagcgcccctatgaacaagctcaaagcaaccaagctaacggcttccaaagccgatcggttagacatgggtggcaccctcttggcaacgacgacaagagaaaatgtcactgcgacggagaagtgtttttaagttgagcaaaaacgcccatgtatcaaaattgtcatgtcccgactctcgtcccaaagaagaggccagaaattgaatatctacaagaagtttgaaaagaatgccatcagagttatcaccgaggtgaaaaactcccatggatgctaatgcaccgttcccactcccatccactctatcaatgctattcgctttcctctactaccacctcgccaaaaaaaaccaacccttgttccaccgccgctcaagaaggaacttcttagcaggtgaagaccgaggggccggggatctggtagttggtgacagggggccagtagatgctgatcttgacaccggggtgggagccctacatatacgagttagtaaccaattggctgggaacaaagtgatgatatatcaaggcaaaaacttacagagtaagcaccggggaaggcaacggtggagggggtcttgctgccggtaccgccgacaatgttgagctgagcacactccatgtagaactgagcaccggggtagttgccggcaccgtggagagcaagcatctcagcacggaggaggtactggccgggggcgatgcaggaggggatcttgatgctgtggcggccctggccgttgatgaccttctcggtgccccagacgccgttgttgtagccgtcctcctggatcttgaaccaaccgccgccgacaccagagtcggtggtggcgtcgttgaccttcttgaggtaggccatggtggggcccttgtgggagatgtccatgatgtcgttgggggcagagccggtggtggagagcatgtagcgccagatggcggtcacgttctgaccagcctggacggtgatgaccttggaggtgggggtggtcgggttgggagcaccgttgcaggcgatcgaggcagagtcgacattctcaatggggccgttgtagctgggcacacggacaccaccaccaacaccgtggttgacaccgttcacctcgagggaggagaagatggtgtgggcgctcgcggcggaggcaaggaggataggggcgaacttcatggtgacggtggatggagtttgagggagtggtccaggtaaacttgctcgaatgtgctcgtcgatggatggctctctagaaaggattctggatgggatggtgacgggtatatatacctgtgccacctgccgtgacaacaccaagtcccgccatcatgctttcaagattgtgcatctttcggttgcaaagacttgacggcctcgggttccgcagttggcagcagtagccgcgcggaatctggggggcatgacagcaggcttggtggcttggaggccaaggagtgccacgccggcgtcaatccggtcacgatcccgatctgggtgcaacatctcggcgcctagtccgactcggtgcagtgaggttgtcatccgtgagggccgccggtggacgggcggaacatgatggtccggagaccaatatagaatgttcggcagccttgccgacaatcccccagacgggcctagccaagcctctagaccttgatctgtcttgcccctgcaatcttttccccttcagggttttcttctctgatggacgtcagttgtcccgctgacaagcttttcccggtttcaggaatcgtgttccccacaaatccgatgatctcatccaactgcagtcttcgtgtgtcctcctccgcagactcttgatggagaaagcgcccccgcggggagcggcagagaaaggcaccttgtgcatcatgcaccccggccttcagcggcctcctttcccgggactctgtcatcatgtttccacaaaaccaggaagcgattcgacaaaagtttttgtcgcttccgttgcagcccagcttctgtggtattttgagcatgtgggcatgtctcttgaaggatattcggggaaccgcccgttgaccgctacgcgtcgaggaggctgtgtgatgtggttggcatcttgatgttgaggaatctggtgtgcaagcgcctgccagtcttggacatgtgtgttgagttgagcacattgtgtttttgtctcgttgttggctgagcttcttggtgctgcaggttttgatcactcgaatatcgggccgcgtacgccgagcaggaaacagcagcgccaacctggcctactaatcatggcggattccagatgattcttccgagtgacttggcgatggaggtcttttattcttcgaggcagccgttgcgctgacgttgtcttgatcactagttcgtcatctatcgtcgggcaaagggaaccttggaacccaacgcgggctttggtgtcggcagctataccatggtgataggaacgaggatatggggggtcaatgggatactagctggatgtctcttatttctctgttgtcagcctcgaacagctcgcaaactatgtttacgtgctgcggtttctggaatagctgccgcaggcagacgtcgacgataccaccgacagtagcaccctgaggaaggtgggtgttatccggcagatgattcttgttgcgcgtttcttgccatcgccttggcaggtgaacatggtcgggcttcgtcgagacttaccacaagtggtgcaagacctccagcagtgaattttgggttgagagataactgaatcctcatctcgagaagaaatcgctcgttctgttgactacacacctcgctacttaggcatcccggccatcatttattgtcggctatttacagccaaaaaatagtatgcccggggcgagtgcttttcaacagctagggcagagggtcgatactagctagttactgtttttaatgagctatacaagttggaaaaattggatcttcgtgcaggtcttcggttctggaggcactggaatcccaaacaaatgacacgaagaatgcttgacgagatctacaatgaaaagggaaatgaaaagtttccagtctgatagtcttgatgggagacgggagtgtggcccagaagagtatggctggcgaaagcggaaagtacgagaggcatgggataacactgccgccttcggggcactttcttgccctcgcaagagatatcggggagggacaaactctgagtatcggatcaatgtttccccaatgtccgataattcgcagatctttccaggaacacggagatgttgtcgctctcgtagtacgtacaatcaaggtccaattccttctcgtttattgccgtggacaatcgaccttcctattggactgcgccatactaaatcattggcattccggctaagtaactcccgatagccaattaccttgtcaaacgcccctcatttgctcatttaccctgctgtatcgaggtgggtaaggagcggttacaacgggggatatgcagggagaatcccttactactactacccggaattcgaggaccttgatcaacgaggagcttctagaggcacgcttgatctgaacaaacatctccagtcctcatcatgatgaccatgttgttgcttgaggctaaccgcaatgttaagtgacctgtctccacgggcggagtcactcgtcccagcgaatgtcgacaagctatttgatctgcttaataccaacggcgaggcgtcctcgggatcaacatggagtcgcgcaccaaggtccctttctgccactcaacaggggagtcggaacttgcttgatggtgttctctcgccggctgccacaactcaaagaccttttgtccaacaacattcaatatggcaggaaccgctttttgagtcggggtgtagaggctcactgcatggtcaacaatgcgcagggcaatgctccgaccccaagatattgttcagttccctcagcattctaggaaactgccttgcctttgcaaccgcgggcttactggcagatgacggcattgttattcgagaagccccactggaggacaccccgacatcactacaaatagctggtgtccccgaaaacatcaatgcaactcagatactcgatgatattgtacgatgcgctgtgtcgtcctgcgaaggcgaaggtagaatatccggcatggccacctgcacgacacagcttatcgaactaaggggacacctgggtggtccgcataacgccgctagccttgagcaattccaggtccttcatgacggcctaggccaatattgtggcaagcttgatatggagtttgagcctgacattgcagggccgggggtaagttggcattttcctctggaaaactggcgattcttttggattcagaaactgaccgcctaacccttctccaggtcctgctgtcacaaatgatacaggcatcagtctcagtcacctcgtttgttttcatcacgataatcagctcttgggcccggttcgttcttttggtccacaagcgaggcgactggaagaaagcggagcgtcgtcacagaaaactcacaacatccagagtccacggtgcgttggtttcggctgccgtggaattccaggaagcccaagccttcttcaccatggccattcagatcgcgaccattgccacgtttgagccgagctttacctgcggcttgtcttgcagccagcaagaatcgatccaatccctgagcgacaccatcatgaatgggcagttgattcgtgctctggcggtcaacagcatgttgcctgtgcttctgacacagtcagtactacaccgtgccggaatgagctggtggtataccttgacgctttgcatcattgtctgcatcttttcagaggtcatcaggtggcaaactgtcactcaagtccctttccacatcctgttaggccggctaaaagatctagtaccagtggatgagtgtggtggtaacccttctctgacagcgtattgcctgacgcctttatacaatcttcaacttgtggaaatgcccatgctgattgtaggatatacaaccgccctggtactccttcttgcgcagagcgcacatcggacatggccgattatttcacctattgtcgagaggcatagacctggtcagttgctggcttacttgggaaagcatttctttcgagtgtcttggtacggattgcagatgacgcttgccatcgccacggccttacatttcgtcactctttggaccatcagccgcggtttgaatgcgtcaccgaaagactggacatatggccaggtggtgtcggcaatgctctgggctccgatattgggaaagtacctatactacaatatttgtaagtggtattgaacagactctgggttgcttctttttcgcttacgtttctgtcttagttggagtgaagaggggagtcgaggcacggcttgcgcgagagtacacggtgattcgacttgagcctcactgaaatgctcagttatccttgcggtatgcctacagcgccagggctttgatcgaatcaccaccccggtatcaggctgccttagccacagcatcacccccaataactatcgacttggcacatccgcaccttcacggaattgcatttaaattcacggtacaaaagctccaggtattctgttttccagcaccatttgcccctcgatccactaccactttccggcaaacaggatgtcaatcaattcacctcagggcagcacctccatgctccacaccctggtggtgtggttagccagctacaccgcctgcgtattgaagaagctgaaaaaatcctttgattcagacctgtcacacctaccgccacttgtttacggccctttacctagcgcagcatccatcagaatcctcgatatgatcaagccagctgcaggagacaaaaacatcatcagactgtcaactcgaatcatcaacctagactcggacttagcctcgctgccggaatatgtggctctgtcttatacgtggggaaacccaatcacgattcgagagtcggtgccagattcaatgaatttcagaaacccctttttctgttccatcaaggggccgaataatgaacgatttggatggctagacccggcaaaatggatttatttctggcaaaatagccggtacatgatagctgaagagaaggtcgattggaacggtgacaaattaaggtggattgagttggatggctgcggcgtgcaggtcaaggagaatatgtttcacttcttggagacagttcaacgggtacgaaaagactctgcagggcctcacggttggggcgggcttcagctagactcaggtttcgacaatgtgggctatccgctttggatcgatgctatatgcatcaaccaggacgacccagacgagcgaggttctcaggtatcactgatgtccagggtctatcaatctgccaaacacgttttggcatggaccgggaagagtgacagactgtcggaatgggcagcccaaaggttcagtcgactaatggattgggaggcacaccgtgcgcaacggatgagggagaagattgaaaagggagaagagcgctcctggagcgatatcaacattgacacaacgctttcgtcgattgagtgaatgtctatacgccattggtttggcttattcgctttttttcaccgtatttggtttcgtcgagcatggatcgcgcaggaggcgactttcgcaaaacgtaccttcgtcttaacctccactaacctgttccctatgatgatggtcctgttggcgctggaggtgattgacaggtatgggtaggaagatgagttatgcaagttaggacgaggcctgcttactggtcggtccgtatcaaacactgaggctttcgttgcaatgcatacgagatatctcgaggatgaacaaggggtcactttggatcatgcagagcgattggcagttgagccacgagatgctttcattttccttcggggattccgatgtattcgcgaaagatcgaacctggacctggcgggcacaggtaccatagtagtgacaggacggagtgagagaggctgggacatcgagattttaccacgggtgcatttggatatcactcgggtacaattatcagtgccccggctgactcagttcccttgagccctttccacgagcggctaagtctacttcctgtcatatcggtctttcggaacctcaatgcctctgaccctcgggacaaggtatttgcatttttgaacattgcagaggaaaaggggcttgttgcgccaaactaccgccaaagtgcccaggccgtttttcgggcgacagcagaggccataattaaggacaccaacagtctctctgtactatcacacattgaagatccgtcaaaccgaaagatcgaggaccttcccgattgggtccctgacttcagcgcgaggctagaaacggaaacgtttgacaatgggtccgacccttgcagatattgcgcctcatatatcaacttcaaattaacggaagcaagcgagatcgtcttccatcctgaggggggtttgtccgtcgtgggccattgcattgacacagtgaaggcagcttgatgagctcccagcgtccgagattcgggactggccgatgacgttggaaaatctgaagacaggaagaagaagagaggagagttacggtgtacggacacaagagggtgatgagcaggagaaggaccaagggtcatcagattgctcaggttatgcagagaagagcagcgaagagctggaagggcctccagaaactgaatccatgtccaaccttgggcataatctggagatcttggaagaagacataaacgaccagaaggaccacttcttcggaggatcttcgagcgtgctgccagctcgacacttgccggctgcaaccaagattttgagctttttggaggagcagggccctctgcaggatacagaggttcaaaacgattgggcttctaccaagtacacgcggaatgcaagccgctgtttttccaaggttcaaaaggcgcaaattcgaaaatacgaagctctgatgaaggaggctacccgcggccgaaaattcttccttcctgacggggagagattcgggttaggcccaaaatcgacaagggagccagacggggaactttatgatcagatttgggtgattgagggagccagtgttccattcattctcagggagactgacacttcgggttgttacaagattatcagcgaggcgtatgtgcaagggttcatgtatagagagttgattggtagcttggttgggccaccgaggaggatctctttggtgtgatgtggtgagctggtggcggccgcgttgttgggtactgaaccaggctgagcttcctgccttacacaacgttcagctaccttacctaccctgacctgattttgatgtttatttgcaaattctgcatttctgtcctcagctctccctaactaggtatgatggtatttgggtagagcaagtacacaccagagtcaaagagagtatcctgcgtgcgttgttgctgggtaaaccaatctccttgaccgcttaatgatgataatgaagcagactgttctctttattccatcgtcgtcaaacatataaccatattgcacatctccgccctcatcaaaagcttcctgggcttttgctttgcgcgttaggggaaaggaatgatcgcccgatcaatcactaaaaccctcccagtcttcctccggttgctcctccctaagctgcactctctctctgtgacgtatcacaagctctcctcgcctgccggtccgcgactcgtcccactctagctgcggcagcatttgatcaatcactaaggtaggtaggtagtctagaaatctcaccaccgggccatgaggctcaggatacgccgggaaaatttggtcgaaatcccaatccatatccacatcctcactctcgctcggctcccagtccatcccctcactctcactctcctnnnnnnnnnnnnnnnnnnnnnnnnnnnnnnnnnnnnnnnnnnnnnnnnnnnnnnnnnnnnnnnnnnnnnnnnnnnnnnnnnnnnnnnnnnnnnnnnnnnnnnnnnnnnnnnnnnnnnnnnnnnnnnnnnnnnnnnnnnnnnnnnnnnnnnnnnnnnnnnnnnnnnnnnnnnnnnnnnnnnnnnnnnnnnnnnnnnnnnnnnnnnnnnnnnnnnnnnnnnnnnnnnnnnnnnnnnnnnnnnnnnnnnnnnnnnnnnnnnnnnnnnnnnnnnnnnnnnnnnnnnnnnnnnnnnnnnnnnnnnnnnnnnnnnnnnnnnnnnnnnnnnnnnnnnnnnnnnnnnnnnnnnnnnnnnnnnnnnnnnnnnnnnnnnnnnnnnnnnnnnnnnnnnnnnnnnnnnnnnnnnnnnnnnnnnnnnnnnnnnnnnnnnnnnnnnnnnnnnnnnnnnnnnnnnnnnnnnnnnnnnnnnnnnnnnnnnnnnnnnnnnnnnnnnnnnnnnnnnnnnnnnnnnnnnnnnnnnnnnnnnnnnnnnnnnnnnnnnnnnnnnnnnnnnnnnnnnnnnnnnnnnnnnnnnnnnnnnnnnnnnnnnnnnnnnnnnnnnnnnnnnnnnnnnnnnnnnnnnnnnnnnnnnnnnnnnnnnnnnnnnnnnnnnnnnnnnnnnnnnnnnnnnnnnnnnnnnnnnnnnnnnnnnnnnnnnnnnnnnnnnnnnnnnnnnnnnnnnnnnnnnnnnnnnnnnnnnnnnnnnnnnnnnnnnnnnnnnnnnnnnnnnnnnnnnnnnnnnnnnnnnnnnnnnnnnnnnnnnnnnnnnnnnnnnnnnnnnnnnnnnnnnnnnnnnnnnnnnnnnnnnnnnnnnnnnnnnnnnnnnnnnnnnnnnnnnnnnnnnnnnnnnnnnnnnnnnnnnnnnnnnnnnnnnnnnnnnnnnnnnnnnnnnnnnnnnnnnnnnnnnnnnnnnnnnnnnnnnnnnnnnnnnnnnnnnnnnnnnnnnnnnnnnnnnnnnnnnnnnnnnnnnnnnnnnnnnnnnnnnnnnnnnnnnnnnnnnnnnnnnnnnnnnnnnnnnnnnnnnnnnnnnnnnnnnnnnnnnnnnnnnnnnnnnnnnnnnnnnnnnnnnnnnnnnnnnnnnnnnnnnnnnnnnnnnnnnnnnnnnnnnnnnnnnnnnnnnnnnnnnnnnnnnnnnnnnnnnnnnnnnnnnnnnnnnnnnnnnnnnnnnnnnnnnnnnnnnnnnnnnnnnnnnnnnnnnnnnnnnnnnnnnnnnnnnnnnnnnnnnnnnnnnnnnnnnnnnnnnnnnnnnnnnnnnnnnnnnnnnnnnnnnnnnnnnnnnnnnnnnnnnnnnnnnnnnnnnnnnnnnnnnnnnnnnnnnnnnnnnnnnnnnnnnnnnnnnnnnnnnnnnnnnnnnnnnnnnnnnnnnnnnnnnnnnnnnnnnnnnnnnnnnnnnnnnnnnnnnnnnnnnnnnnnnnnnnnnnnnnnnnnnnnnnnnnnnnnnnnnnnnnnnnnnnnnnnnnnnnnnnnnnnnnnnnnnnnnnnnnnnnnnnnnnnnnnnnnnnnnnnnnnnnnnnnnnnnnnnnnnnnnnnnnnnnnnnnnnnnnnnnnnnnnnnnnnnnnnnnnnnnnnnnnnnnnnnnnnnnnnnnnnnnnnnnnnnnnnnnnnnnnnnnnnnnnnnnnnnnnnnnnnnnnnnnnnnnnnnnnnnnnnnnnnnnnnnnnnnnnnnnnnnnnnnnnnnnnnnnnnnnnnnnnnnnnnnnnnnnnnnnnnnnnnnnnnnnnnnnnnnnnnnnnnnnnnnnnnnnnnnnnnnnnnnnnnnnnnnnnnnnnnnnnnnnnnnnnnnnnnnnnnnnnnnnnnnnnnnnnnnnnnnnnnnnnnnnnnnnnnnnnnnnnnnnnnnnnnnnnnnnnnnnnnnnnnnnnnnnnnnnnnnnnnnnnnnnnnnnnnnnnnnnnnnnnnnnnnnnnnnnnnnnnnnnnnnnnnnnnnnnnnnnnnnnnnnnnnnnnnnnnnnnnnnnnnnnnnnnnnnnnnnnnnnnnnnnnnnnnnnnnnnnnnnnnnnnnnnnnnnnnnnnnnnnnnnnnnnnnnnnnnnnnnnnnnnnnnnnnnnnnnnnnnnnnnnnnnnnnnnnnnnnnnnnnnnnnnnnnnnnnnnnnnnnnnnnnnnnnnnnnnnnnnnnnnnnnnnnnnnnnnnnnnnnnnnnnnnnnnnnnnnnnnnnnnnnnnnnnnnnnnnnnnnnnnnnnnnnnnnnnnnnnnnnnnnnnnnnnnnnnnnnnnnnnnnnnnnnnnnnnnnnnnnnnnnnnnnnnnnnnnnnnnnnnnnnnnnnnnnnnnnnnnnnnnnnnnnnnnnnnnnnnnnnnnnnnnnnnnnnnnnnnnnnnnnnnnnnnnnnnnnnnnnnnnnnnnnnnnnnnnnnnnnnnnnnnnnnnnnnnnnnnnnnnnnnnnnnnnnnnnnnnnnnnnnnnnnnnnnnnnnnnnnnnnnnnnnnnnnnnnnnnnnnnnnnnnnnnnnnnnnnnnnnnnnnnnnnnnnnnnnnnnnnnnnnnnnnnnnnnnnnnnnnnnnnnnnnnnnnnnnnnnnnnnnnnnnnnnnnnnnnnnnnnnnnnnnnnnnnnnnnnnnnnnnnnnnnnnnnnnnnnnnnnnnnnnnnnnnnnnnnnnnnnnnnnnnnnnnnnnnnnnnnnnnnnnnnnnnnnnnnnnnnnnnnnnnnnnnnnnnnnnnnnnnnnnnnnnnnnnnnnnnnnnnnnnnnnnnnnnnnnnnnnnnnnnnnnnnnnnnnnnnnnnnnnnnnnnnnnnnnnnnnnnnnnnnnnnnnnnnnnnnnnnnnnnnnnnnnnnnnnnnnnnnnnnnnnnnnnnnnnnnnnnnnnnnnnnnnnnnnnnnnnnnnnnnnnnnnnnnnnnnnnnnnnnnnnnnnnnnnnnnnnnnnnnnnnnnnnnnnnnnnnnnnnnnnnnnnnnnnnnnnnnnnnnnnnnnnnnnnnnnnnnnnnnnnnnnnnnnnnnnnnnnnnnnnnnnnnnnnnnnnnnnnnnnnnnnnnnnnnnnnnnnnnnnnnnnnnnnnnnnnnnnnnnnnnnnnnnnnnnnnnnnnnnnnnnnnnnnnnnnnnnnnnnnnnnnnnnnnnnnnnnnnnnnnnnnnnnnnnnnnnnnnnnnnnnnnnnnnnnnnnnnnnnnnnnnnnnnnnnnnnnnnnnnnnnnnnnnnnnnnnnnnnnnnnnnnnnnnnnnnnnnnnnnnnnnnnnnnnnnnnnnnnnnnnnnnnnnnnnnnnnnnnnnnnnnnnnnnnnnnnnnnnnnnnnnnnnnnnnnnnnnnnnnnnnnnnnnnnnnnnnnnnnnnnnnnnnnnnnnnnnnnnnnnnnnnnnnnnnnnnnnnnnnnnnnnnnnnnnnnnnnnnnnnnnnnnnnnnnnnnnnnnnnnnnnnnnnnnnnnnnnnnnnnnnnnnnnnnnnnnnnnnnnnnnnnnnnnnnnnnnnnnnnnnnnnnnnnnnnnnnnnnnnnnnnnnnnnnnnnnnnnnnnnnnnnnnnnnnnnnnnnnnnnnnnnnnnnnnnnnnnnnnnnnnnnnnnnnnnnnnnnnnnnnnnnnnnnnnnnnnnnnnnnnnnnnnnnnnnnnnnnnnnnnnnnnnnnnnnnnnnnnnnnnnnnnnnnnnnnnnnnnnnnnnnnnnnnnnnnnnnnnnnnnnnnnnnnnnnnnnnnnnnnnnnnnnnnnnnnnnnnnnnnnnnnnnnnnnnnnnnnnnnnnnnnnnnnnnnnnnnnnnnnnnnnnnnnnnnnnnnnnnnnnnnnnnnnnnnnnnnnnnnnnnnnnnnnnnnnnnnnnnnnnnnnnnnnnnnnnnnnnnnnnnnnnnnnnnnnnnnnnnnnnnnnnnnnnnnnnnnnnnnnnnnnnnnnnnnnnnnnnnnnnnnnnnnnnnnnnnnnnnnnnnnnnnnnnnnnnnnnnnnnnnnnnnnnnnnnnnnnnnnnnnnnnnnnnnnnnnnnnnnnnnnnnnnnnnnnnnnnnnnnnnnnnnnnnnnnnnnnnnnnnnnnnnnnnnnnnnnnnnnnnnnnnnnnnnnnnnnnnnnnnnnnnnnnnnnnnnnnnnnnnnnnnnnnnnnnnnnnnnnnnnnnnnnnnnnnnnnnnnnnnnnnnnnnnnnnnnnnnnnnnnnnnnnnnnnnnnnnnnnnnnnnnnnnnnnnnnnnnnnnnnnnnnnnnnnnnnnnnnnnnnnnnnnnnnnnnnnnnnnnnnnnnnnnnnnnnnnnnnnnnnnnnnnnnnnnnnnnnnnnnnnnnnnnnnnnnnnnnnnnnnnnnnnnnnnnnnnnnnnnnnnnnnnnnnnnnnnnnnnnnnnnnnnnnnnnnnnnnnnnnnnnnnnnnnnnnnnnnnnnnnnnnnnnnnnnnnnnnnnnnnnnnnnnnnnnnnnnnnnnnnnnnnnnnnnnnnnnnnnnnnnnnnnnnnnnnnnnnnnnnnnnnnnnnnnnnnnnnnnnnnnnnnnnnnnnnnnnnnnnnnnnnnnnnnnnnnnnnnnnnnnnnnnnnnnnnnnnnnnnnnnnnnnnnnnnnnnnnnnnnnnnnnnnnnnnnnnnnnnnnnnnnnnnnnnnnnnnnnnnnnnnnnnnnnnnnnnnnnnnnnnnnnnnnnnnnnnnnnnnnnnnnnnnnnnnnnnnnnnnnnnnnnnnnnnnnnnnnnnnnnnnnnnnnnnnnnnnnnnnnnnnnnnnnnnnnnnnnnnnnnnnnnnnnnnnnnnnnnnnnnnnnnnnnnnnnnnnnnnnnnnnnnnnnnnnnnnnnnnnnnnnnnnnnnnnnnnnnnnnnnnnnnnnnnnnnnnnnnnnnnnnnnnnnnnnnnnnnnnnnnnnnnnnnnnnnnnnnnnnnnnnnnnnnnnnnnnnnnnnnnnnnnnnnnnnnnnnnnnnnnnnnnnnnnnnnnnnnnnnnnnnnnnnnnnnnnnnnnnnnnnnnnnnnnnnnnnnnnnnnnnnnnnnnnnnnnnnnnnnnnnnnnnnnnnnnnnnnnnnnnnnnnnnnnnnnnnnnnnnnnnnnnnnnnnnnnnnnnnnnnnnnnnnnnnnnnnnnnnnnnnnnnnnnnnnnnnnnnnnnnnnnnnnnnnnnnnnnnnnnnnnnnnnnnnnnnnnnnnnnnnnnnnnnnnnnnnnnnnnnnnnnnnnnnnnnnnnnnnnnnnnnnnnnnnnnnnnnnnnnnnnnnnnnnnnnnnnnnnnnnnnnnnnnnnnnnnnnnnnnnnnnnnnnnnnnnnnnnnnnnnnnnnnnnnnnnnnnnnnnnnnnnnnnnnnnnnnnnnnnnnnnnnnnnnnnnnnnnnnnnnnnnnnnnnnnnnnnnnnnnnnnnnnnnnnnnnnnnnnnnnnnnnnnnnnnnnnnnnnnnnnnnnnnnnnnnnnnnnnnnnnnnnnnnnnnnnnnnnnnnnnnnnnnnnnnnnnnnnnnnnnnnnnnnnnnnnnnnnnnnnnnnnnnnnnnnnnnnnnnnnnnnnnnnnnnnnnnnnnnnnnnnnnnnnnnnnnnnnnnnnnnnnnnnnnnnnnnnnnnnnnnnnnnnnnnnnnnnnnnnnnnnnnnnnnnnnnnnnnnnnnnnnnnnnnnnnnnnnnnnnnnnnnnnnnnnnnnnnnnnnnnnnnnnnnnnnnnnnnnnnnnnnnnnnnnnnnnnnnnnnnnnnnnnnnnnnnnnnnnnnnnnnnnnnnnnnnnnnnnnnnnnnnnnnnnnnnnnnnnnnnnnnnnnnnnnnnnnnnnnnnnnnnnnnnnnnnnnnnnnnnnnnnnnnnnnnnnnnnnnnnnnnnnnnnnnnnnnnnnnnnnnnnnnnnnnnnnnnnnnnnnnnnnnnnnnnnnnnnnnnnnnnnnnnnnnnnnnnnnnnnnnnnnnnnnnnnnnnnnnnnnnnnnnnnnnnnnnnnnnnnnnnnnnnnnnnnnnnnnnnnnnnnnnnnnnnnnnnnnnnnnnnnnnnnnnnnnnnnnnnnnnnnnnnnnnnnnnnnnnnnnnnnnnnnnnnnnnnnnnnnnnnnnnnnnnnnnnnnnnnnnnnnnnnnnnnnnnnnnnnnnnnnnnnnnnnnnnnnnnnnnnnnnnnnnnnnnnnnnnnnnnnnnnnnnnnnnnnnnnnnnnnnnnnnnnnnnnnnnnnnnnnnnnnnnnnnnnnnnnnnnnnnnnnnnnnnnnnnnnnnnnnnnnnnnnnnnnnnnnnnnnnnnnnnnnnnnnnnnnnnnnnnnnnnnnnnnnnnnnnnnnnnnnnnnnnnnnnnnnnnnnnnnnnnnnnnnnnnnnnnnnnnnnnnnnnnnnnnnnnnnnnnnnnnnnnnnnnnnnnnnnnnnnnnnnnnnnnnnnnnnnnnnnnnnnnnnnnnnnnnnnnnnnnnnnnnnnnnnnnnnnnnnnnnnnnnnnnnnnnnnnnnnnnnnnnnnnnnnnnnnnnnnnnnnnnnnnnnnnnnnnnnnnnnnnnnnnnnnnnnnnnnnnnnnnnnnnnnnnnnnnnnnnnnnnnnnnnnnnnnnnnnnnnnnnnnnnnnnnnnnnnnnnnnnnnnnnnnnnnnnnnnnnnnnnnnnnnnnnnnnnnnnnnnnnnnnnnnnnnnnnnnnnnnnnnnnnnnnnnnnnnnnnnnnnnnnnnnnnnnnnnnnnnnnnnnnnnnnnnnnnnnnnnnnnnnnnnnnnnnnnnnnnnnnnnnnnnnnnnnnnnnnnnnnnnnnnnnnnnnnnnnnnnnnnnnnnnnnnnnnnnnnnnnnnnnnnnnnnnnnnnnnnnnnnnnnnnnnnnnnnnnnnnnnnnnnnnnnnnnnnnnnnnnnnnnnnnnnnnnnnnnnnnnnnnnnnnnnnnnnnnnnnnnnnnnnnnnnnnnnnnnnnnnnnnnnnnnnnnnnnnnnnnnnnnnnnnnnnnnnnnnnnnnnnnnnnnnnnnnnnnnnnnnnnnnnnnnnnnnnnnnnnnnnnnnnnnnnnnnnnnnnnnnnnnnnnnnnnnnnnnnnnnnnnnnnnnnnnnnnnnnnnnnnnnnnnnnnnnnnnnnnnnnnnnnnnnnnnnnnnnnnnnnnnnnnnnnnnnnnnnnnnnnnnnnnnnnnnnnnnnnnnnnnnnnnnnnnnnnnnnnnnnnnnnnnnnnnnnnnnnnnnnnnnnnnnnnnnnnnnnnnnnnnnnnnnnnnnnnnnnnnnnnnnnnnnnnnnnnnnnnnnnnnnnnnnnnnnnnnnnnnnnnnnnnnnnnnnnnnnnnnnnnnnnnnnnnnnnnnnnnnnnnnnnnnnnnnnnnnnnnnnnnnnnnnnnnnnnnnnnnnnnnnnnnnnnnnnnnnnnnnnnnnnnnnnnnnnnnnnnnnnnnnnnnnnnnnnnnnnnnnnnnnnnnnnnnnnnnnnnnnnnnnnnnnnnnnnnnnnnnnnnnnnnnnnnnnnnnnnnnnnnnnnnnnnnnnnnnnnnnnnnnnnnnnnnnnnnnnnnnnnnnnnnnnnnnnnnnnnnnnnnnnnnnnnnnnnnnnnnnnnnnnnnnnnnnnnnnnnnnnnnnnnnnnnnnnnnnnnnnnnnnnnnnnnnnnnnnnnnnnnnnnnnnnnnnnnnnnnnnnnnnnnnnnnnnnnnnnnnnnnnnnnnnnnnnnnnnnnnnnnnnnnnnnnnnnnnnnnnnnnnnnnnnnnnnnnnnnnnnnnnnnnnnnnnnnnnnnnnnnnnnnnnnnnnnnnnnnnnnnnnnnnnnnnnnnnnnnnnnnnnnnnnnnnnnnnnnnnnnnnnnnnnnnnnnnnnnnnnnnnnnnnnnnnnnnnnnnnnnnnnnnnnnnnnnnnnnnnnnnnnnnnnnnnnnnnnnnnnnnnnnnnnnnnnnnnnnnnnnnnnnnnnnnnnnnnnnnnnnnnnnnnnnnnnnnnnnnnnnnnnnnnnnnnnnnnnnnnnnnnnnnnnnnnnnnnnnnnnnnnnnnnnnnnnnnnnnnnnnnnnnnnnnnnnnnnnnnnnnnnnnnnnnnnnnnnnnnnnnnnnnnnnnnnnnnnnnnnnnnnnnnnnnnnnnnnnnnnnnnnnnnnnnnnnnnnnnnnnnnnnnnnnnnnnnnnnnnnnnnnnnnnnnnnnnnnnnnnnnnnnnnnnnnnnnnnnnnnnnnnnnnnnnnnnnnnnnnnnnnnnnnnnnnnnnnnnnnnnnnnnnnnnnnnnnnnnnnnnnnnnnnnnnnnnnnnnnnnnnnnnnnnnnnnnnnnnnnnnnnnnnnnnnnnnnnnnnnnnnnnnnnnnnnnnnnnnnnnnnnnnnnnnnnnnnnnnnnnnnnnnnnnnnnnnnnnnnnnnnnnnnnnnnnnnnnnnnnnnnnnnnnnnnnnnnnnnnnnnnnnnnnnnnnnnnnnnnnnnnnnnnnnnnnnnnnnnnnnnnnnnnnnnnnnnnnnnnnnnnnnnnnnnnnnnnnnnnnnnnnnnnnnnnnnnnnnnnnnnnnnnnnnnnnnnnnnnnnnnnnnnnnnnnnnnnnnnnnnnnnnnnnnnnnnnnnnnnnnnnnnnnnnnnnnnnnnnnnnnnnnnnnnnnnnnnnnnnnnnnnnnnnnnnnnnnnnnnnnnnnnnnnnnnnnnnnnnnnnnnnnnnnnnnnnnnnnnnnnnnnnnnnnnnnnnnnnnnnnnnnnnnnnnnnnnnnnnnnnnnnnnnnnnnnnnnnnnnnnnnnnnnnnnnnnnnnnnnnnnnnnnnnnnnnnnnnnnnnnnnnnnnnnnnnnnnnnnnnnnnnnnnnnnnnnnnnnnnnnnnnnnnnnnnnnnnnnnnnnnnnnnnnnnnnnnnnnnnnnnnnnnnnnnnnnnnnnnnnnnnnnnnnnnnnnnnnnnnnnnnnnnnnnnnnnnnnnnnnnnnnnnnnnnnnnnnnnnnnnnnnnnnnnnnnnnnnnnnnnnnnnnnnnnnnnnnnnnnnnnnnnnnnnnnnnnnnnnnnnnnnnnnnnnnnnnnnnnnnnnnnnnnnnnnnnnnnnnnnnnnnnnnnnnnnnnnnnnnnnnnnnnnnnnnnnnnnnnnnnnnnnnnnnnnnnnnnnnnnnnnnnnnnnnnnnnnnnnnnnnnnnnnnnnnnnnnnnnnnnnnnnnnnnnnnnnnnnnnnnnnnnnnnnnnnnnnnnnnnnnnnnnnnnnnnnnnnnnnnnnnnnnnnnnnnnnnnnnnnnnnnnnnnnnnnnnnnnnnnnnnnnnnnnnnnnnnnnnnnnnnnnnnnnnnnnnnnnnnnnnnnnnnnnnnnnnnnnnnnnnnnnnnnnnnnnnnnnnnnnnnnnnnnnnnnnnnnnnnnnnnnnnnnnnnnnnnnnnnnnnnnnnnnnnnnnnnnnnnnnnnnnnnnnnnnnnnnnnnnnnnnnnnnnnnnnnnnnnnnnnnnnnnnnnnnnnnnnnnnnnnnnnnnnnnnnnnnnnnnnnnnnnnnnnnnnnnnnnnnnnnnnnnnnnnnnnnnnnnnnnnnnnnnnnnnnnnnnnnnnnnnnnnnnnnnnnnnnnnnnnnnnnnnnnnnnnnnnnnnnnnnnnnnnnnnnnnnnnnnnnnnnnnnnnnnnnnnnnnnnnnnnnnnnnnnnnnnnnnnnnnnnnnnnnnnnnnnnnnnnnnnnnnnnnnnnnnnnnnnnnnnnnnnnnnnnnnnnnnnnnnnnnnnnnnnnnnnnnnnnnnnnnnnnnnnnnnnnnnnnnnnnnnnnnnnnnnnnnnnnnnnnnnnnnnnnnnnnnnnnnnnnnnnnnnnnnnnnnnnnnnnnnnnnnnnnnnnnnnnnnnnnnnnnnnnnnnnnnnnnnnnnnnnnnnnnnnnnnnnnnnnnnnnnnnnnnnnnnnnnnnnnnnnnnnnnnnnnnnnnnnnnnnnnnnnnnnnnnnnnnnnnnnnnnnnnnnnnnnnnnnnnnnnnnnnnnnnnnnnnnnnnnnnnnnnnnnnnnnnnnnnnnnnnnnnnnnnnnnnnnnnnnnnnnnnnnnnnnnnnnnnnnnnnnnnnnnnnnnnnnnnnnnnnnnnnnnnnnnnnnnnnnnnnnnnnnnnnnnnnnnnnnnnnnnnnnnnnnnnnnnnnnnnnnnnnnnnnnnnnnnnnnnnnnnnnnnnnnnnnnnnnnnnnnnnnnnnnnnnnnnnnnnnnnnnnnnnnnnnnnnnnnnnnnnnnnnnnnnnnnnnnnnnnnnnnnnnnnnnnnnnnnnnnnnnnnnnnnnnnnnnnnnnnnnnnnnnnnnnnnnnnnnnnnnnnnnnnnnnnnnnnnnnnnnnnnnnnnnnnnnnnnnnnnnnnnnnnnnnnnnnnnnnnnnnnnnnnnnnnnnnnnnnnnnnnnnnnnnnnnnnnnnnnnnnnnnnnnnnnnnnnnnnnnnnnnnnnnnnnnnnnnnnnnnnnnnnnnnnnnnnnnnnnnnnnnnnnnnnnnnnnnnnnnnnnnnnnnnnnnnnnnnnnnnnnnnnnnnnnnnnnnnnnnnnnnnnnnnnnnnnnnnnnnnnnnnnnnnnnnnnnnnnnnnnnnnnnnnnnnnnnnnnnnnnnnnnnnnnnnnnnnnnnnnnnnnnnnnnnnnnnnnnnnnnnnnnnnnnnnnnnnnnnnnnnnnnnnnnnnnnnnnnnnnnnnnnnnnnnnnnnnnnnnnnnnnnnnnnnnnnnnnnnnnnnnnnnnnnnnnnnnnnnnnnnnnnnnnnnnnnnnnnnnnnnnnnnnnnnnnnnnnnnnnnnnnnnnnnnnnnnnnnnnnnnnnnnnnnnnnnnnnnnnnnnnnnnnnnnnnnnnnnnnnnnnnnnnnnnnnnnnnnnnnnnnnnnnnnnnnnnnnnnnnnnnnnnnnnnnnnnnnnnnnnnnnnnnnnnnnnnnnnnnnnnnnnnnnnnnnnnnnnnnnnnnnnnnnnnnnnnnnnnnnnnnnnnnnnnnnnnnnnnnnnnnnnnnnnnnnnnnnnnnnnnnnnnnnnnnnnnnnnnnnnnnnnnnnnnnnnnnnnnnnnnnnnnnnnnnnnnnnnnnnnnnnnnnnnnnnnnnnnnnnnnnnnnnnnnnnnnnnnnnnnnnnnnnnnnnnnnnnnnnnnnnnnnnnnnnnnnnnnnnnnnnnnnnnnnnnnnnnnnnnnnnnnnnnnnnnnnnnnnnnnnnnnnnnnnnnnnnnnnnnnnnnnnnnnnnnnnnnnnnnnnnnnnnnnnnnnnnnnnnnnnnnnnnnnnnnnnnnnnnnnnnnnnnnnnnnnnnnnnnnnnnnnnnnnnnnnnnnnnnnnnnnnnattccaaattccggctttccccccaggagttttgcagtggcagttggataaggtacataaacttcaaacacacatttttgtgagaattttcattcaggcggagcagacacgtggacacagaacggatttgctagagatgctgaaccagacaaagcaccagggtctttcccaggggccggattcaaacatttccacactttaaatggtacttaccttataataggggcttagtttcgccatggactgcactgtattcattattgtcttccatacaagctaggtacaatgcagagacatcacagctcaagagttccagttttcagcttttgactgtctgccgaaccatgtgtgttctgcaagccttgcagctgcaggttttcacacctgatcttaccataagacccgaatcacgcgctgaaaacagattaacgactgtagaaaattggaagttgtgggccgaaaagtgactggcgccaaaggtgaagcaaaaaagtgcaggaggaaggttatggtaatggagcaaaatctgacaaacagaggaaggccacagaaaggtacgcgaaatataagccctcagagcaacctgagtgtgtgggcctggcaaaaggtgggatcagagcccagggagcaaccacagaagcagaggcattgtaatttgtcacgctgatgcggcgtgatgtccaagcagaattcagttgaggttggacacagacacgattggtggcttgatactggtcagagcaggcaacctgcagggcgcactgggaggttaactacccctatcttaactggttgggccaagccaatattgaagacagccacaggtgcttatgcatatcaggctcttctcattgcgagatgacacctcgaatattaaatgatgacacctctggcatagccagaacccgagattgtattcttctatcaaaggcaacccacctcgcggcgtgtttttgagccaattattgccacacacaattacctatcatcatcaacatggaagctgctggacttgccgtcggcattgccaccctatactcaacatgtcgagattgttacaactttttcaccactgtcaatgcggccgacaaagaggtttcggttcaccttcgtgaactggtcatccagtagtccattctgaaagcctggggcttccattggcgcattcaggatggaggcgacactcagcaacctggtcagaccagacagaaccaaaccaagcttcacaactacctattgaagaaccgcttcaaagccgagggcgtcttcaacatcttctctgcccttgccgacacactgtcaaaccaagaggaacttgtcagaggatatggaatccagtttcggtcaacgcaagcaattcaggatggatcccagttggccagcaatgtccagttagccattcaggacacgacaatcgaggacatcaagcctgtgatcactgagtttaagcaacgtctttcgaaactcaacaagtttaagtgggctctgagagataaggatgacttcagaaaactcatttccgacttgaaatcccacagcgaatccctctaccgcctttgcccggaaaacgcctttgagtcgatgaatgtctactttaccatggattgtttggctgtccaggagtcaccggcagtgctgaagtggatttcaagaatcgcaactgagcatgcagagatcgacaagggctcttcggtgcggccggactacgaactgctggcttcagcggctacattgaaggcatctgtaaacgaaaacagggacaatgtacagacagatgacggcaagctcaccactatcggcgaggaggaacccgagatgaagtatttggggaagggtcttgctctgtttgaaggtgaagttgtctatgtggaaatgcgagactatcgcggaccgccactagacctcacaccagaacagaaacggaagatcaagcgccgtcggactcgagcgcgactgttggttgaaggcaaagacgtcagcagcgacgaagaagacgatggcgagccgataaaacccgtcagaccggctgatcccagacttcggattctgattcgaaactttttcaacacattttggtgcaagaatacaatgaaaagtgtttatgggcttaacattgctggcatgattgatcatacggaaggggaccatgaaggccattgcagcatcctctataggctcccgagcacgataggcattcacgatcggcagcggccagcggagaacctgaagcttcgtgcacctgttcgaataaaatcccttcttgggaccaggaaaatggatggcatccggtcaacactgggttcgtgttttgagcttgccagaagtcttgtgcgtgccgtctgcatgcttcactcaagcgggtggctacacaagaacatacgtgcagagtctgtcatgttctttccgaaacatgtgagcacgctccaagaggaccgctatgaaatcaaacttgaaatagatgtttcgaagcccatcctgatggctatattttttcacggccagacgacatcaagcatgaaatgcgcaaaccctcctctcaaaaggaccaacttagaaagcccccagtggattcccgcaatatactaaaacatcacactacatacatctggcgagataccaatgactcctcaagcaaggattcagaggaaagcatggaagggtattccccggccagctagtatatatggccgcgatatactgaacaagaccaaagaaccggaacaaacaaaagatctaaacattgctggctttacactcgactattatcagcacccggcaaagcacgcagatccgcagcggcggtatcgccatgcatatggcgtgtactctcttggtatactgcttctcaaagttgggttctgggaggagttgaagaactatgaggacttccgctctggttataacaagattcccgattacgacaaagaggatcattatgaaccacgcaggtggatctgtcgagagtacttgaatcgtcctaggtgggcatgtggggatttttatgccgacgttgtgctcagttgtctcatggtggatagtagcgatgatgaagtagcgaaggagagcaagcaggagctttgtgcgagactagttgcggacttggagaactgtcaagcctaagcaaactcgctggtttcctgtactttttgtctattaatagcgttcgggtaaggagacgagaggtatttgcccagcaacatgtttcttcacttacttcgtgtaagaggagaggttactcactaggtaggtagtgggtcaggcagagaggttgctcttaggccactggcctgagcccataggttggctggttaagggtatatttggcttgctttccttttctttggcatcttgcttgtacctcattttcatcgcatattcttctgcgcagggtttccatcacttccaaaggtatccaatggaactgaccttcaaaaaagaacaatcatcattcaaagtccatatcaatacctaatggtacataccataccttgcagtatctccctccacctcatcaccaaaaattccacttgaatcaatatctcatctcatcacaataacctctgtgaggctgtatcttgaacccagagtacattcgagacctactggcgccaacctgtggggggatacgggggatagtacagtggttataccctcctcacgccccccccccctcaccattaccatcatcttgtcattcctcacaacatccaacctatccactaccacatcacccacccccaaacctcaaccctcttctcctggtcccaatgggcagaaggcataatcatcaccccacctcactacaaccctcacccctcccaagccgtcgaagcacctcagccaccgccacagccatcgctgccaccaaaaggcagtctcgtccagaaacgagctccccactgtgagtttcccgctcgatacacgccggtatgtcaacccaccccgccccaaccaactgctccaccctcatttactcttcaccaaagggatgcgacgcatcagcctgcctagattacctcacccgcgagtcaaccctctcccaaggcacatcaattcatcaccaagaccaagacaaaattatgaaaaagaataagtggtatcatcaattcatcatcagccgacattttataaatacatgagtgagacgtgctctctaagcatctgtcccttgtgtgtacacgttgtgttttggttcattatcatttcattttttttttttgcctgtccccatccaaccatcatttactcggcatcaagaggcgcacgaggaggagtgtcgttgacctggataccaccacgtttcttctcatggctgtcaggcatgggaagagcccacccgccctcaccctcgggagtggcgagccagagtctgaggagatgtcttctgggagcaggaggggcaaagtctattgtccaaagttagcacggaaacaagtcaatgttggagagccgaaagaagtaactcacccctgtaagcagtgcgagcatggagcaagtgagcattactcaagaactgaatgtctccaacctccaaaaccatgtgcagagcctcctgctggcaggtatcctcaagcaccttcagagcatgaagttgttcctcgctgagaggaggaatgatacccttgtcggagaatctggtcaaagacttgacatagtagggatcccacttgcagtagagacggccctggccaccgttctctatgtaaacaataggctggcgaacccactcctcctggccattgctgacctcacccttgcggtcaaagtaccagatcggcttggtcagagtctcggcaacatcagggtgctccttctggagaatgttccagacgttatgaaccgagacaatgtcgctctcaccaccctcctgggcgcggtgtacgcacaaaagaccgacgatatcaccatcatcagcgtggaagaactggcgggcggcagtgcgatagatgcggacggtgtgaatctgagtcgggtcatcaccgacatccttgacgtggccgaggacgtggccgcggccgttctgagagacaaagtatccaagataggtgccgagacccatgtaggcgacggcgttcttctctgggccccaaacatcggcagggaagcgcttgaagaggatgaagcccttgccgttgagaagatcttcccggaggtcagtcaagaccttgccgagcttgggaaggacaaagttctccttggagatgccggtgagtggtgtgccgctggcgatgaaagcgtcggcggtggcggacaactcggcaacctcctcatctgtgaaggggtgcacccacttctcagggttgttgatgaagtcatcgcgcttccatactgtgcggccggtgatctccttggggaactcagagtagggcttcaggacgtcgtagagaggggggtgctggccagatgtgcggatgccgtcagggaagatgtggcggggggcatcgaggttgctcttggtgacttgaggaagttgagccgcaggctcttctactaggattccgggagccattgtgtatggtatgtgtgtgatggtgggtaaggtagggggcggtttggaagtgctgggtgatgactgccaaatgaaagagcttgatctgataatggaatatttggatctgatcgagagctcacatgtctggcttataagtacatggcgtcctcgatagaagggggccatcttgtcgattgcgtgatcatcccgggattgggcccagagactatcatctgcaatggggccgaggtctcattggaagaggccatgatgcacccacgtttcggcagcccactcccgagtgacatcggtgctgggcgtcgggatttcgttcaggaaagagcattgggatgattgcgatatcgatttgagggatggcgtgctcggcttgcgatgacgtgaaggcttaagcgctactgccccgcaatgctaatggcgctatttccccctcgacacacctcgatcaaagaggcgacgtggtaagctagttccctttttggagctcccaccgtattattcggctttcgggatctgagatggtgttctttgttggatgctgaagtgaaggtctcaaaggagttggtggggtaggggaggtgtaagtcgtgggggttagggttcagcgcgggtgtgttaccttgtcttgccggcacaacatcgagccacattaagttgacaatagatggttgtcaccgattggagcttcgtgcagatatgccgaggtagggtggacaaagcttgggagcgatttgcggtttgaacattgtggtactttgtttgaatgggggcaggaacacaggattaggtaaaggcaaaggttcagtttgaggttgaggtccgcatgggtagaggcacttacgtgttgtgaaactgggcgtctcatccatgacagattgatcagcaaaatggctcacgaggctacccctatttccattcaaacacgcccgactctgacggcaacggtcgacctgataaaccgatctttactatttgtaaatattactaattatccccccaagcatcattgtgtatatccagttacgttctttcctcgcattcaccctccccaatatctatcaatcaaacagccccttcaaatcaggcaccaacctcctcagcggatgggcctccgtattaaaaacccactcatccagactaatcaagtccggctcactgaacatcaaataaaaatacttcaacgtctcacccagccaaaagctctccatcgagtccgtcttctccggataccgtttgctctcatccacgttctcagggtcataacgagtaatatccgacagtgccgcgttggcgagctcagtcttggtattcttctcgatagcttcaaacatcttccatgctttttcaggcaagtcctttcggccggttgtgcggtagagaataaataccgactcgatcgcttcaggtcggagaatgtatcgagtatccggaagcgacgtgaaccccttggagatgtgcttttcggcgatgagtgagttgagctcttcaggggagatgtcatcgggtgcttcaagctgccttttgatcgcatctttccacttggtctcggaaaacgtacactctggcttctcgggcgagattgctaaaggacagggaagcatggtgaatgtctctggcatgatccccacgggcatgtgtgaataggtccagatgcaaccatccatcagtttctctccgacagacacatgggtttggttctccacaagcttgccaccgagggcgagcataccacctgcgaagcaaacgagatgctggccttctggtttgagagagtagacagtatcatcgccgcttcgggagacagagacaaggccagagacaaggacgtcggcgttgtctggaagcataggccggaagacatttcgtttgatgactgcctccatggccttttcatacatttcgcgatattgtggcagtagacccccgacgagagcatgggcctttgggagatattcgtaccaagagtcagccatggccccgatggtgaagtcattatgtaggttgaattctgtggtgcgggcgttgacaatgacaggccacattcctgggaaacgcgtggtgtcttgttgcttatgcaggagctcggtgatgcgatgcgcagcgtcgaaccattttgggtctttggtgaggagagaaagcctggtgaactccagagcgaatgtgccaatctcggcaagaaggacggattcgtcggcttcctggggtttgtttttggatgcatccacagcgtcccatcttgtcatcggcatgcggttgggagtatcgaaggcgacatagagcatttctccaacctctgttgctttacgtaggagccgtctatcgccacttaggtcgtaggctgccagaaagccacccagatatcgaatgttggtctcaaatacgttcactttgtctcccggggctttggaaaagtcgatcttggacgcagcttccactgcctccttgaactcatctttcaggtccatgatccagagggtgtcgagactgtcgaccaaggttgctccccagccgccaaagacatcgcgcttcccaccgctgatgggcatgatctcgtcactcatccaggcgtgcttgcggtacgagttccaacaacgctgaaagacctccttgacggcatctcggcgttcaagtcgaacttgacgctctgctacgggttcagtctcgatgaacttttgaacctttggaagccactgtggggagccctttggaaactggcgcatgtcctggacagggtaattgggcttcaacttgctccattcgatccggtctgctgtgtcttcctcgtcgttttggtccttgtcattgacgttgtcatcggtgttatcgtcgaagtagtcattcggggggacataattaggatccccactactgccgggcaggaaattgtcaccactgccatcgccgtgatagctctggaaagggtcaatgacgtaggagtattggtatgatctcttgcggatggcgaggaagacgaatagaaagatgcctacaatcaagaagacatagcttctattcctcgaaaagagcagcattgtggcagctgtagagatcaacgggcaggatggataccaccctgaatttgggatgggtaccccgtccaggttgttcccagcgaatccagggacgacatgaattaagattttggcgggtggtgggggcattggtgaactgccggcttggcactgtaagatactgtaaatacgatgcgggccacgtggcagcgctgagcgacagtgaccaacaaactgttgtggacacgctgtggcagggctgccgtgcagggatctgtgtaataacgtgtattcgtaataagctggcgggcgactcgtccaccacgtcgccctcccgtgactcactgccctgcatcatcgatgaaacatcaacaaccactcatcatggcgtgattcaccgtcgatcaatgtcatcagacaacacgttataaaggcagcggctcatcccttgcggtcactttgcggtcatcgacgttttctccctgcagctgcgacggaaggccaagtggggatggaatgagcttcattactttgacgcgtcaacaatggcatcattttaacaacaccaccataccttacgtctggcatctcaagcattcaccacaccgtacctgatcaagcccatcaaaccacccaacacaatggcggacggagcattcaacttgaagtaccgaccaccaacatagctggtagctgtgatgacaacccaccagggatcatcacccaaactgcgaccagcctggaatccttggtcaatataccccaccatgaagattcgatacacggccgtatagatcaagcccacggcgccggcgttgatgcctctcagcacagatttgacccatctcctgttccttgccgcgctccagagtcccatggtgccatggaccaagatcaagcctgggctgaagatagcaacccaggcaatcaaggcgcccgcaacagagctgtgtccggcgttgatggccgtcaaactcccgaggaagacagcaatgttgaagttggggccagggaaggcttggatgagggcgagaccgatcaaaaagtcgcgagcgctcacccacccttcggcaacaacgtactctcgcagcaaagggatgacgacgggtccaccgccaaagatgattgtgcccgcaaggtacatgttggagaagaggcggtagaggatgggagggccggggtcggggagaacactgcgtagcaccatggccacgatgaagctgaggaagaaggtcacgatgatgactgtgccagtcttccatgacatgttgaacctcagctcctgtggcacaatgcgtggttcgttctcagcagtcgaccccgacgggcgctcattcttattggcctcatcttcgctgactggaagttctgagctgggcccgggttgcgatggcccaagttcatgggaatttcttgttgttgtggcactgttttgagggccagcttcggggtgcgtcgccctctttcgcttcaccttcctcaccagagctccgagtgggcgatggatccaacggtagtcattgaccaaggtcgcaacacctgacacaagcatcaagacgggaaagtaccacagggcgttgtacaacatgccagcggcagcagtgacaaagacaattatcctcgtcaatggatcagtgatggccttctgggacagctccaccgccgccagcgcaatcacgccgacagtcgcggagttgaggccggagagcagcgcatacacgattcgcggcaggttctcgtcaatgctcgacacgccgatggagaggccaaacatgccgatggcccccggaagactccagagcaggaagctaaacaatgccgccataaacccgccgtggagcaggttgatgcagtagagcatttttgtgctggcgggtcctgacagcgattgcgagatgctgaagatctcctgaaagacctgttcatcgacccattttgacttttggacgaacttttcgttgaactgcgcgccggacaataataagcaactggtcctcgctcctgttttctctgcggtttttttttctttatactcacaatcttgaagtgaaccggtggaccaccaaacgcagtaaccccgagatgccaattgacccggaggaccttccacccgcggcgggccagcgcccggagacggcggggcagttcccccctattttcaccggctccagtggagctcatttttggctttgtcgtcttgaacccccagacgctccaaaacagttgagcaattcgccttttgcgacgacaaactttgagaaatcggagacagcagaacggcttgtctcactccaaatggtgtgcgatttgcatgaaggagggaaggacccaggaactcgggacaggcatacggcagagaattgggtgagctgcaacctccctgcagctgaggcgatggtgcaatcctcggcgtccatttgtggcgttgtgtgctagccgactttggtggttttttcaccagctctttgtctccactagggttagggttcaaacaacgtggaagccccctttcacgattcaggggttcttttatccagacgatgagcttcttgacaccgaacctttttatatagagtaagacatcaaacttcaccttatccaaaccgaatctgccaaccgccacagttgactctaccgtctagtcagcataccaccagtaccatgcgcaagcaacgacgcctgcaccttgggagacctatggaaggtgaaggagctatccggtgcctttttcacatccgacatcaccgtgacttcggaattttctgtgttgtgaaaaatagatacattgctgagcagaaaaatgcggtaccagcgcccgcgacaaggcgccatatggttctttcgtgacgagagtctacacacataaagaagtcaattgatatatcacaaacgcatcaacaacacccgccctacagggttggaggtgctgggggacaataaaagtcaccgtcaccaccggctcagctagggccatccgctttgcaggccagacctcccaagttcaagatgtatttccctcagactgggttcatcttctcttattgtaggtgtagcaaccgaggcagactttgttatcttgtcctgcctttgccccgccaagtcgagaccgaagacaagccggccaactaccttgtcaatcaataagaggacatcaacaccgttcctcctcgtgtagcttggcagaaatgacctgtgaaggatacgaaaagctctcaaaccaaacgtcccaagtgagcaacaatttccgcccgttcatgtcttttaaccctattttattttacgagggagtctacaacggcctgacgcccgccgaacatttgcatatataacttcccccatgattattctttcttaccttcatcccatctaaacttttaccttcattccatctgagctttacctttaccttatctgagcccctttcttttccctcttacttaactttgaaaaccccgctcccacaggttatgatgcccttcttgcgcgtccttgtttgatcaacgacagtacgccagcttttttcatagcgaccacgtccggcggaagggcggattttctttccatcgaccctccccgatcacgactacattcacagacgagctacaacgagcgagatgacacggtggtggctttctccaagacgtaccatggagaacaacgcgacatccccagacatggatcccaactaggaataaaaccacacggaagcgattcacggtgttcttgcagcagaccaacgcgatgccagacaagaaggactaccacgccgaacaggtagcttgtgagttgatatagtcttggtcgcggcattggccaacacccccagtcaccgacccttatcacgaactgttcgtcagtatcaacctagcatcaaatttggtcatggaattgcagacctcttcacctttccgtcccccgtgaaaagtgataatttcggggaccccgctcagtagaaccagttcttatttttggatcgtgggccgagactagaacatcgaggagtagaagcacgaatgggggagagcagggtggttacttttccataaggtatccaggacggccgcttgctgcgaggcatttatacggaggggatgttgtccaagactgtggtaggtttcaaggggaaggggtttggcggctgatggcaagattacctgacatatcggaaatagaaaggcacagttggatgcgatattgacttttcccagactgtcagcaaggctatccctatcttcaacaggcgtaacgcaaacatcgcgatccttctgacctacctacctcgtgccccaagccgtgatactttgcatgagttgtacccgcgtccgagataaccgcacgtggaaatcaaaaaatcccatcactgcaggcaatcaattttatcattggggatggtccacggatgtggcccggttgccgttacccgggccgagagtttgtcatttgtagcttgatttgtattggacaagtgtgtgtgagtgagtgtgacgatccattttcccaatctgtacccccaggaccgccgcatcatggcctggagggcggctgtgatggcccgtcttgatgattgttaataatgcagctaaggccgaagatctgatatcacattattaaaaagagctgtgggaattggagatctttgtctgctattcgtgtcgcttttggtgaggtgaaataagaaaagcatacatgggtgccgtggaagccatgaagtgtttccacattccttccagtccagtgaagagataggctgactttcttcttgaccaatgcgagccctcttccaaatcagtgattgatatcagaacaatatgtatagttaacgatgttgatctttgcccatgtaatatcaagatacagcaaagcaagtcacggtcaatcaactacctccaaaccgggaaaatgtcaatatagattgtgcccagcctagacaggcgggccaatcatccacgaaaactccaatgaatgaggtgcggggttgaataggccggaaatatgagaggagtaaacgttgtaggctgttcaaaagtaaataaattgattgcatcgcggcaacccccctttcgcggctaccatggccaccggcagttgtgttcagatcactgcctccaactgacttccataacagttctctccattatcatagaactgaaacggaccgagatccactcgtttgttattgctgatcgatgagatgcaccaaggcatatgggtgctgcggcggtcccagtttgtagcccttggcgggctggcccgatacaggggaggggaagacgtggtatttgagccttcaataaagactgccatggtgcttccagatttccctgacatattttgcttccctttgactgtcaggtgttgttgacttcttcacgcgtgtgccaagcttacccctgaaccttcgagataaaaggagacaaagacaagatgcactggagctccgctgcagctcttgcgctggtcgctccggcgtcagccctgcttcgattcggctgttctcagttggtcgttgagcgaaccgatcccctcgtcaaccccggcgtggcaccatctccgcatcttcatcagattatcggtggtgtaagacactccgacaacagagcaaggatacatactgacacgtaccagaatgccttcaatatttccatggaagccgctgccggtgatatcgccaagaaggcgacttgcacaacttgccaattctccgaagacttttccaactactggacagcagtgttgttcttcaaggcgagaaatggaagcgtccatcgagtaccgcagattcccaacgctggcttcgaaggttccaatggtggtatgactgtttattacatgcaagacggcctggtcaactaccagcaaacttccaaggtgacggcgttcaagactggcttccgtatgctcatcggcgaggccatgtaccgcaaccgagcccaggcatccaagttccgtcaaatcacctacacctgcctcaagacttttggcacgcgttatcccgagacaatggatttccccaaggagccatgcaacttcggaattatgtccaacgttcgtttcccaacctgttgggacggaaagaatcttgactctcccgatcacatggcgcacatgtcatatcccgagtctggaaccttcgaaggcggtggtccttgcccagcttcgcacccagtgcgtgtgcctcagctcatgtacgaggttatctgggacacaaggcagttcaacaacaaggacttatggcccgaggatgggtctcagcctttcctgtggtcgatggatgattcgtaagttcttcggccggcctgatgtgaattgcacacagctgacatgttgataggactggcttcggatcgcatggtgactacatgtttggctggttggacgactcgctacagcgtgccatggacagtccctgctacgtcaactgcccgaccctcaagagccagagcatctcggcgatgaaccagtgctcagtaccgaccgtggtcgacgagcccatcaatggctgtaagtggaatctcgtgagctgttcctgcggtgcttgatggcagctgacaattctttgacagggctcaaagcacttcccggcgctgcggaggaatcttagtcgatgtagaggatgcggagatagaggggctgccgcagcctgggttcgggcattttcctgcaatatacgtcagagacagagtcagagacacttttttaccataatgaagaccgagtgtcccctatgtttcgggtgatggccatccctggtctcaaaagtgatgccatattgaacacgttattcctggtacaacatggtgttcttttgttccgagaactcgagtggttcaagccttgagcattgtttcacaaaagccagagttaccgacaagctggcagtgcagtgcacgagaacacaacgttgctgctgcagaaaaacgtgtgattctgtccaaacgacgggctggtgatgtccgtacccgaggtgaggtggaagacgagaatagaacagaaggggcgagatgcctcaacgccagatcgaatcgacacccaattgcagcccaggtctgtgatgatcattgctgcagcctgaagtgctgttagcgactgcaaggaaccatggtctccgacccggcaatgactgactccttcgatccgctggtatccggtgagccggcccttttgactactcaattcttggttgtggcgtgttgaaggagagcagctttccatgctcgaccgagcactccgcggttgatgatgccctggcggagaccgcggtgggcatccagcgcaacgtagcactggcaatggccgtgggctgccccacccctcgggcgcgccccaccgctggcgatggcctggcatccggctgcggcacagcagcttttgtggaattcagcgcggttgcaacagtgacgtcttgtgacgacgggccagccactggaatacgaagttcttcaatctacaatgtttgcatccgctgtcacctctctgcaagagcggataactacacactcgttctttgggcccttttctccaatcacactgagcttctagccaggtcccacagttcaccgacttctggcattacactacacacgagaagatctgcagcctcaaggccgcttagggaacctcgcgcccctcgcctcgtttgtgcaaatctcatggcgcagctctattgacggcctgccactccgagcaactgggtccatgatgccgaggtgaaattgacggtgagggaggggaagcctggaacttggaacggaatataagccggacatattcccggccagagccaaatattcagaaccaacattccagtcacttcaagtggatcaaaacaccatcacagattcagtcaccatatttctcaaccttctcaactctcaacaccacacataccatttaacttcgctccacaatgcatctcacttccgtcctctcccttgcggcactccccctcctcacctcggcctcccccatctccaccaggcaaacgacctcaaacgggacctcttgctccaacacctccttcaaggacttccaatggcaggcatccaactttgactttcacgcctcattcatttttagcacccccgcacaccaaaactcctggggctacgcctccttcgacctcttcaaccccgccgataagagcacagttcaatgttctgccgctagcaaccagatcaatgacttcttctacggcaccattcaatacagctgcaacgacaccctccgcggaggctccactaagtttgacttcaacaggccttccggcgagttgagagtggaacagagctggacctgcagagaccaggacccgcagtacccgtaagccgttgccattttgcacattgacttgggttaattgagttctaacatgataaacagcatcacattcactgccaagggctcagcaaacgtcaccctcggctgcaccgaggacttttaccagaatgccaactggactatgggcgacatttactctaggagaacgatcacctgcggcaaggtcgactcggccgtcgtcccctatgagatctcagctattgcctgattttgactgcgctcaacattgaaggcggggcagcgatgatattgatgacgggatgaggatatgaaaatagacaatgtacatggcttgagtacggtacaaatggcagacgacgacgatgttttatctgttttctttttgttcgcataccatagagaggaggattatgtttctcggttgatgaaaagttgggttagttaatgcttaatgagatgaaagaagcttattacataaaccgacctaagctgtgacatcaccacttcacaagcgccatttgatcgagtttcttgcactagggtacctgagatcgatcgaggttgatctgacagatggaacacgatttcattctaactaaagatcttgggacaatctgcgagatatgcaagcccttgaactatatccgcgccgttggtaagccggttctgttttgcgatctgtccggccagaactctgcttcaaatcgacgtcatgtactgacggcattgagtgcaagcgtattgagagagtgtttgaagaattgagcagttgtaatgtcctctccgtatgaataacggaccattcctaacaatatatgagatctcattgtcaccagactacgcaaattcatccacactcatattttactaccctatttatcaactcactaaaatgaccaaacccctccgccaaatcgccgccgagaagctcatcggccccaatgccaatccctcccagcttggtgatccgatttcactaaagacagagacgaatgatgcgaactctaacccaaggggtgagccggagaacaagcaagacttttccaaaaccgagagtaaagtcccagagtcgtcaggtggaagccatgaggaaaggatgctgaggggagaggggccaaagggacatcatgtgagcgggatgatgactgatgagattcggcaagggaagaggggagctcggggcatgactatggagggggatgctactagtgtgaagagggtggaggttgttggggatgcgacgaagggtgggagggggaaggggtcgaagttgtgaaagattgccagaaatggagaggatgattggaatgagaaagtgtcaacgtcaagggttcgagatatatgaaactaaggctggtggtgaggctgtgtgctaaagaaaggaagtgatcgccagatgcttggaaaagttgtggtgaattgctacgccgtattcaggctcaaacaaataaccactccaagcaaaagtttgtaacactgcagagctggttaggatattaatgcgcctggtgctgtgacctctgccattgaatgatgattggtgactcggtgaagacgctggctaacagggtgccacagtcctcgggggcggcccggcccggaaaagcaaacacgatagcttggagcacagctttgttgattatcgtgcttcagtcttcgagctaatctcccattgtcaacactgttcgacattttttgggcctcaacatgcatgcatgcgtactttaattagagactacccctgatgtataccaagttacctcaccgatcgttagttcgggggggcggtgtgcagatatcattgataatacgggtatccagttgagttcttcatgggcctttgctagctgtgcagttgaaaatgaggctccggaactcccgttatacctcccaatgcagctgggtgaggacatagcaggggacatgtaccgcccatataatgatctgttcccgaccactggtttggagcgttctgttgctctcttatagcctccaagcatttctaagacatggaacccataactccttaccgtccataccttttgcgcctttggttcttggtggccctagtgcttgtcacaacagcctctctgggactggtcgaatattccctccaccaacttctatcaactgctgatctcagcagcgcggttgtggctggctcagactacaactcgacctcctctacaccttccttctctccgtcagtcgctcgcaagacaaccgtaacccgtacgacacttgcctatatcaacgcaacagtgcagataccacatgcaaaagcgacccgaggtatgatgcgcactgaaaccagtgaaaatacacacatctccaagcgagccggacgccaggattccactaacccaagggttaccagatggtaagttgaacctccaggttatgtgctctttctcttccatccatacaagaagtactaatgcatcggtttcaggaacccacgtcccacacaaaggccttggaatccagaaaggaactctccaaaagacttgagcatagtggcagaatgttcagaaccccccactccccgggcatctggagattgtgccataatacttgaccccagtgtaatgagtgtacccgcctatataagtccaatcggttcagcatggggtggatgggtgaacattggattgcctgcaacattgctccttacgcctcgtcctcccaagactctcgcacccacagcaactagctaccccgaaatcgaaactgaaacagtggtggaaactctgacagtatattaccctgaaagttatctcgacgacagacctgctcccgataccgaggtggtctaccccgaaaccaagattgctactgagatagcgcttcccaccaccgagacaactttcaccgatgcagttcctaacattcagaccgttcccaaccccgatatatctcccacttccactcagtcggcaggtattagcacagttttcactgagaggccatccatcaacgtagtcctcagcattcatacagttcccaaccccggaattattcccaaacagatgcagcccaaagcagcagaaagcaccattatttccgatttagaggcaatggataaagaatacaccgaaacaaacaggctgtttaccagctggtcacccactgtgcacgccactgccccccggcattcagcatcactgaaaaactggtcaacctctgacacgtcctggcagttacttacccccgcaaatgccataataatcactagtacttcaacaccctcagtacctactctaagagggtcatctcaactgggtactccagagtctttcatgtccacaagcactgttccaacaccgaggacagggggctcgacaacaactggctcactggaatactcaacattctcaaaggccataataagccccatcatcacttcatctgtttcacctaatgaggaaagttccacaagcggaaacggctcatacattgtttatgtattgacaccagaagcttactttcttggatcctttgctcctctcatattcgccatcctcttctatctaccgtgggccagtttagatgcagttgcaaagaggatggagccgttttaccgactgagcagctccaagggcgcagtagcatccgagtccctgaacgtttcctacgaaagccaagtacccttggtcgggcagctctggatttcacttatccgaagacactgggttgtatcactcacctcttttctggtcatattatgccaggtcttgatagcactttcaccagaagtaatccgaatatctgtgatagggaccgactgccgtgcgaacgttgcatgtcctggggtattgagcgtgtcgacagcgcctgccagggcaatggaagctatgttgctcgtcatgattatttgcactgcggtgcttgcagggcagctttggaaccgacgatcccagctatactcggaacctttcagtcttgctggcacggcaactctggtggcgaatgatggctccttcttgcagctatttcggcaggtggactcccagtctctgacgtcggatggcaagggattggagaaagcattgggaaaaaacacgcgataccgcgtcacagtatacaaaaatgagctaggggcagcacaaaatggcattgttttggagccaccgcacacgacctcccaagcctttccggccaccacaactcctgcatctggcgtcaaattccttccagtaaaacggtcaaatccccttatattggaattatgtctcctttttctcatcatcgtcatcattctgccgataataatctggtattatcttaacaacgaccaaaaccatccgcttgagcaattcctgagcggccaggactttggagtcaggttccttttcgcggcaataggcatcctcatcgacgagctttggaagaacattttttcaagtatgcgtcccttccttttcatgcacttttgcctatactaacatgagcaaactcaccttctagagctcagtattcttgtaccatacatcaatatgtccaatcccaataccgcggcaaagccccaagactcgatgcttttcgaacctcctttttcaccattgaccgctctctttcacaaaagcacatatcgctcgttgccattaacgattgtcaccatgaatgcgaatatggccctgattcttacggtatatttagccaacatccccttcagcaacgataaagcgagagtggcgtgggtagcatcatgctatttcagtttggcaatctttgggctcatgatcataagcattatcgccctcatgatcctgattcgagcccctgagacgcccctggcgccagacaccatcgccgcgcggctctactatctgtctgcgggactcacgatcgcttctcggttcgggccattttcaacgttgaatactggggacagggatagggccatcaccaaatgtgacgcgggtttgacgggttatcgctttggttggttggcttacccaagccaaagctcgagtcagagccagtcacggccctctcaaaggacaaggggagtcaatcagagacatgacaggatggttttggggattgagtcaacaagggtattgactcgttgaatggccgaggattgtgatgatatatcgcgggcgatactctattgttacctatcgtggtttgtaaagcaataaactcgtcttgttgcacaacgcagggcaaaaaattcaggtgccgtaatcagcgccgaaagctaaactaccaaattcatactttgattcagaaaagatcgaaggactgccatgagcggatctttccctgcccagactgggtctcccttggcctcgaccaaggctccctcgtccaaggataaatcttcctcgaccaaaacccgatcttcctccagtgcattcccgagcgagttttcctccagcggatttttgagcgaaggttccgttacccaaagcggtcctcggacttgggtgcctggccgtgagtccacgctcgagaaaagaatattgcgtaaaatcagacagcacaacgaccgaggcgacaccgatgccaagatcatcgtcaattttgttatcgattttgaccatgatcagtatatcaaaagccacaagaagggcgcggacaccgacttaaactgggcctacacactcacaggcttcaggaacattgtccaggcatcaaccgcgctcgactacatgagccagacatggccccaaacaggcgcccgactgtacagctatctagacttgcgcttacgtcaatcttcgtaccacagatttcgtgtgcagttcgctggaaatgggggtgcaaacatcaccgtgcacctcgacaaggaaacaccagaccttgaagcggaaacatgccatctatccatcacagccagtggtcaccaaaaccttgtagcctcggtggctagccaaatcgcttggttctgtggcgcgttcagaaaatcgcccgaagatggtctcatctactgcaaaccgacggtcagtgagacgcttcattttgattcttcggactcgtcgagcgatgacagcatgagatttaatattggttacatcgacacgcccatcgacgggtccgaccttgacgtgccacgaacctgctggaatggcctttttattgaccaacctcattctcggattgtgtgcggatacccaatccgtgttcagccagggtatgcgttcaactcaacaagcgtgcctttgacggggttggagataacgtggaagatcatcatgaggattcgtgaggacgagacgccggttgggaggcctcagaacctggcaaccacgccggttgttgttcatgggaagtgtttttttcttatctccaaggtgttgaacaagggagtggtgttttggcatttggagcggcggtgtgatcatgaggggtctgagttcaggcttgataacttgcctcgtccggaggtgagcagtgacttcgactttgaccagctagagaattacaggcacttcattgggggggagtgtggggtgaggaagctttttgtcattgaggggcggttgcaggagggctttacttgccccgattgatagggatactttagagggcagaattggtcccgggggagtaggtacaaaggttgtattcccatcatattttgtctccttctctgtggcactttcaaagcacgttctatgtaaaacaaatcattcaacaggttgaagatcggttcctcatgctaatgattcaacaatgagtaacgctgttatcccatcagactcagggccgaccttacaaagcatgtcattcgacacacaatttactctggcatctgttgattgctggtctgactcactcagtgatgtaatgttttccgtcgcatttccaaatgtatgaaatgggtgccaacagaatgattgacttccactgcatactttccagtgttgtcccaaatcagtgtccccatttgaactcgactattcattgtatcaaacatttcccccatcaatgagcaaagaagccagagttcagcatggccactccattctggctccccggtgaaaaggtctccgaggtagaaacaaaaatacgtgacgcaataacaaaccgtctatctcgcgaagatttctacgaaacaaagctttcacactacgccatctccatctcctggaaacctctcatctcgtatcccaacaatgatcgacccgcaaaccgtttaagccaggcatgcaccctcgccggctaccgcaacaacgtccaagcagcctctccactcgagtacatgaaacaaacctggcccgacagaggaccagaggtctaccacttccttgctggagcttttagcatcaacaacccttcaatcacaccacccactgattcagtagggattaaaccctcacattatgcaaccctccaagcaccagatgggtcggatattatccttgacttgactgaacaccccggcggtccaagccagttcattaaaaccccatctcatcattgaaatccacaacgccgaaccggagattatcgctgagatagccagccaattagcttggtgttgcggggtgttgaagaggtcgaaggtcacggactcgatttactaccgtatgcccaacgctaaagggttcgagttagaaaacactggtgcaggcctcagaggcagctgcaagatttactattattccgtctcgtttaagcaccaccgccatcccaaaccgtgccggcaggcgctgttcacgacggggacacagccgtaccctggagtgttaactggatacccgatcaggatattgccggattatgtccttcccaacacacccaagacaggccttgagatgacgtgggggttgttggtgaggtttcttggtggggaggaagagcaaccccgtaggccgagtagtagggaggagttggtgaaaacgccgattgtgttaaaggggtcgcattttatgctttgttctgtgattttgaggagggggagggtgtcctggcatttgatacaggataatggcatcaagaggccgacaagctttgggagtgatcctaacaatctgcccaagccgttgtatgtggatgatggttttggtgtggaggacggggagttggaaaagtgtcggcatgtttgttgggagtgggtgtggagggtatcatcagtgtgttgttaaggaaccggggccttttcgggtggttccggctccggtgggaaaatcaggtaggtaaggtgggcaagggaagttttgcttttgtgagggatctcgcaggtagtcatagcaacaaagacaggacagtccagtttctacgaagagatcacccatttccacattcgaactgcttttaatgcctggacttgtgaatggacctggttgaactgaaatcgcgcccttatcctcgtcaatgtctctaaagtacccgaacaacaaagtccctaccttcgagccctcctctccgtgatgtcttcagtctcatcatcgctatcccatgccctcttacccccctcagactcatgtcggcctacatggttaatgaaccggttgttttcatgactgtacatcccaggtgatgactgtcccaacgagccagaccaaaacgaatgtctccccaactgagtatgtcctctctgatcgaagggcgataacgataagtacgtgtctgatgccatgtcagcaggcccaaacaaagaaagatcagccggttgcttcccagtgccaccctgcgatcgtgacccaaaacttgagccaagaccactatcttgaaacagagcttccacttcgccaacatcatctccagggtccccgcacagccgtgatgctctttcccaggtaagctggcggtcaactgtggatcatcactctccggcttggcacgtccggacggccgagccattctccgccaacgggccgccgggaccccacagttctaaatccgcttagctccgagcgccgcaatcctgcatcatgcatcaacgacagcggtcaagaacccacctaactgtcgtctcgaactgaccaaccgatctcaatcgccagctcggctatcacttgaggtgactcagactatcatccgcccttcaattgagcattaaatacttgcatgttccattttatctggatcgattgcttttcacctgtggacacacaaagccgttagcggattacaccatcatccccgccaggcccgccacagccgttgccgtcatcggctgcccgcgtctctcaactccaagcctcatcgcttccacagtttcacaaccaacctcacaagatgtcttccagtcacccaccacaaccggcagcgtctgcccttcccgccgacggcctcaacgttctttcaccagcgccaatacaaaccgaatccagccctctgctccccaagccgccatcagcttcctcatcctcctcagaagctgtcagcgaggccggcaccgaaacagaagaatccacactcatagcccagccactttctcccgccaggctctacataactctcacctcatcctacctgggcgtcttcctcggcgcagtggacgcctctatcattgtcactttgtctggacccatcgcctcagagttccagtccctgtcactgttatcatggcttgcggcatcatacctcatcgccaatgctgcttgtcagcccctgtcgggtagactcaccgatatctttggtcgtgggccgggactcgtcttctccaacttgatgttcggccttggtaacctcatttgtgggttggcaaagaacgaacagcaaatcatcctcggacgagtcatctctggagtgggaggcggtgggctcatgagcatcagcactttccttgccacggatctggttccattgaagaaaagaggcgtggtgcaagggctggggaacattgcttatggcacaggcgctatgctgggtggcgtatttggcggcttcatcaacgacacttcgtcctggggttggaggttggcttttttgattcaggtcccgatcattgctgtcagtggtggattggtggcttatctggtgagggtgccgcccaaggtatccaacaagagcttgatctcgaggatcgacttcctgggtgccttctttatcgtcgggttcttggtcttgacgctgctcgggcttaatgccggcgggaatttggtcaggtggacggatccattggtcttgacgagcattccgctgggtgtcgcaatgctctttgccttggtgtggtgggaaggcagggtgaagcaaccgattatcccggtgaagctattggttgaaaggactgttgctgcagcgtgtatcacgaatttttgcaggtatgtatcccccgatctttcttcaagacaagaaaactgacgatcccagctccatggtgatgatgatgaccatgttctatgttccactgtatctccaggtccttggctacacacccacacaatccgcatatcgcatcctcgcatcttcggtcggcgtctcgttcgcgtcggtcggcagcgggttgatcatgaagcaaactggcaagtatgtcggcctgggcagaattgtcttgtcagtgtacacgatcgccattgctctcaacacattgctggaccagtacacgccaccttggatcccgtttgtttccatgaccctccacggtgctggatacggtgctatgcttactgttaccctccttggctgtattgctgctgttgaacactcgcagcaagccgtgatcacgagcgctacgtatgccttccggtcggtaggcaccacgctcggcatcactgtcgcatcggccgtctatcagaacatcctgaaggcaaagctgtgggaaagattcggtgatctgcccggtgcggctgaggagatcaaccgaatccgtgatgatcttggggagttggggcggttgcctgagggttggcatgatggtgtaattgcgtcgtttatggaggcgttcagaggagtctggctgactgcgcttggcttgactgtcattgctctgatcagtgtctccttgatgaagcagcacaagctgcactcgacgttaaccaggcaggaggaataggtcctctgtttaaaactgaggatatgttgggcgatgcctggtaggcaggggaggagcggggaagggaggaaggagatgatggcggcatcagtccatctgtcaagcaaacgtgcatatgtatcagttgttccttccaccacataacccatgagatatcgctgcgtaaacgttaaacgcgtcaatgactcaacatctccgtctggaaccctcctcttcctttttcccagagcatgatgtagcaaaagataacctaaactcgggtcaaagacaggtcaaactgggatcaagatggaagtaagctgggattaaattgatagccagctgggatataggacagaggttggatagataaggctgggatatagctgggatgaagaaagatggcttgtagtactacgtttcgagtcgtgctcgtataacttatcgggtgccctcaacaaacttccccagtaaccaaattccaattccctaatatagtaactctgaatcttttatttattcttaccataatgcgctggtgattttgccctgccccaccgcacctcaccgacaaccgcccatgccttagcgtggccacatcgacagcccagtttcatgacatgcacaacgaacgaacaccattggaacccagagcctcgcacaacgctgcggatttattttttctgtcaccatcactgctgccggttctttccgtttcttttgctttcacctcctccaaccgttggtacctgcgcacacctggtacatggttcatgcatcttcaactgccgcttgacagctgccgcaggccgcatctgatacaccgctctctttcgcaccaccaccacgacgcatcttcagttttccctcaattatttcaccttccccatttcttcaaccttcgccccaaacccccagcctttcatcaaccaccaacccctcagcagccgatgcactacccccaaacgtctcagaacaacatccacccccatcaaccacaacaaccctcatttctcaccgtcatcccctcccctcatcacgacagcctccacctcctcaacaaaacccacatcaaagtgtaataacccaaatgttctacccctgcctggcccctgtccttctttcgggtccgagaccgtgcatacgagcgggacctcccgtatcagcattctcatcccctcacctaacacccaccccccctactagcggcggccgcccaaaaaaaaaaccttatctcaacgttcacaggcatctccccaggcaacaggcacaccacgcctcatgcgcaagcaaccaatataaacaacgccccccttttctcttgcatttcgcgcttccaaacaacacttcatccgcaaggctgactggtgtgatgtatcacattatatgggtatgaacgttcttttgtacctggacaaacagtcagccaagttccatatccccatataaggctctcgagagtccgagtaacagcacctagtggtctgcctaacggtaagtaggtagtttgggtcaaggttgaccggccagaggcggcaaggatagtagtcctacaactgtaagtttctttgttttcttattggcccatccttgtttcttctaatctatcttgttggaactatggaatgtgtcgactacctatagaacgaacgacgtagacccgctttcgtgacggagctaccatccacctatacaaagtacttgggtaggtaggtatgcctcaactcaaggaaataaaacatcagagaaggtaaaggtaagtaaagttctatcgttggcttcctcatcatcaattcttgttttgtcttccacctcgtcatcaccatcatccacgaagaaaagtttcttcgcgtctttttttctctgccatttccacacttgttggcaattctcatagtgatatatttcccgtcgcaacagcaaaggcaccgcaaaaggccaggtaggcacaccctgccaacgcagtcgttgtcgtatccagtcgagtctttgcacttaccgtggcgcaaaagacgacggtggacacgccaatgatggcgaagacctgccccttgtccaactcagcgaggtatagtattccagctgggacaaggagcagtagagcagcggcgatgacgtggatggtcttgaagatgaatgtcatgaagggaatggggatgtagttgtccttagactgtgaaccgggctgtcaacagtatctgtcagcttttggacatccattacgtctagaacaagagtgtggcgacagaccttgaaccattggttatatcgtctgctgatgtcggctgacgtctggatgacccagtaagggggcgggtcggctaggctgatcaagtcctcgggtgttcgaaggatgatgccagcctcagggtcgaggttcttgttgtcggtcatccattcgttttttatcctccactgttcagggtgcgtagcatactgctgttcgtttgccttgacgtaggcacaacgcttgactggtttgcaatggttagctaccgcataggtaaccagggcagtcgtggttttccgggtatcttgtattttcttacggtagtcgtctaattccttccttaagtctgccttgatggtctcgagcttgtcctccatcaggggttgtccagccggtcgtttgtggttcgcagtcgggccccttgcttcctcgggatgctccttgtagtattcacggagctcctctgagagatagctgatcctatactggctgtcaaccagtaggtgccaattctcccagccgaaagctctgtaagacttccagttggaccatcgatcgaacatacccgccagctctgcgacaccgccgtgatggatggacttttcgtttcctatgagtcaaaagtgccattagtaaggcttgatggcagaggggatccttatttgctacttactgccatcacgaaaccggcagttatcgtaagggccctctgcgcctgggtgtgctgggattagaacggcacgatgagtatgaggatgcgtgcagaagaactcactactgtccactttcgagcatgtctcaccactaacagacgctgaggattcgggcccgatagtggaatcgcatagttgctctacagagtctccatcaacaggacgctccgaggatctaggagagtctgaacgttgcccaacctctgttgtgctggcatctgaaggaagtggcatcttggtaaaaaggggctgcggtggtttcagggtaggccgttgtggaaacaaacaactgaagtcctcagacgtcctagtcccctctcttaagcattttggaagctggcaagcacacaagagcctctttcctcttcactgtctccgtgtctcctccgctccggatgcctagcgtcaggcattggtcgtgcagaaaagagtgatggtgcatcgagacgtctggcagccttgccaatgtcgagagggtgtgccaacgctgatgacctgtgaactgatgaatatcctctgcagtatgcagcgcacaactggatagcgctgatcgaagaataatggcgagaataaactagcggtgactgtgggacaattgggccatcggtgctgcgcctcgtttggggccaaaatgcatcgtcttgtcgtcaacgcagagtaacaagacgcccggaaacagtatagaagtagcatggcggaaggaaaggcggacaaggggcagcaggctcgggcacatcggggagcgacgagacctctccgcttctcgaaaccaatgtccagaacaccacgcgccatacttacagacaagcccattggttgacgttatggtccacacccccaaagcaccggaataacagaattgtgccgagcataagtaggtgagtgtgtaagatgcagacatgaacatacgtggcgatcaggtatggaatagggggccaaaagcatggccacgatagcgggccatcgccttcaacaggaagttgttccaacacccgtgacggaacatctccaaggtccgccatcggcctgagagccttgtcttgtcaaaggcatcatgggtcccggactggcggcccaactacgtgcaaattaagccaacctatctgccttctgatatcttctgagtcccgagaaacaaaacaattcgatggtatgttcttctgtgccgaccttgcgacagtttcgactgttcttcttgagctcttttccatcctggagactggccgttccaggctcagctcgtcgcgcctgcagtttacggttgtatgatggtacaggtcgacgcacagcgcccagcgcttcatccgcgcaaacaagatcgtggctcatggcttttcagacgcggctaactcggttcgccagaatcctcatcgtcgcggtatgttgctgagccccatcgtttcgatgttgacaatgttcccgatgtttgccttgtggggcgcagtcttcaaagtggtgacatggactattcagcggtctcgatcgatcgtggaaagcaccgtcagacgagaaagtgtatcagagctaccgtcgagcaagttttcgaggattgttgagcagagagttcacaggaaggaatccaaaacaccgatggcctgggcggtaggtggtgaggggaaagctagcgatgtataggtaggtgtgccgttaaatcaggcctagcgaaccactcttgaagcgagaaggagcaatcacgctcgcattggcacatatcgtcccatatttagaaaatcactcttcaggacagcagcgacgagaactctcatggaactgtggcttaagggcggctgtcgcgtctcaataataaccagaggtttgagccacatcttaaaaccatgcttgggcgatcgcaggaaaacaatattttccgtccccgtcagtgtctccatcctatcaaaacagcagctcaatgaatgcgttaaggtagctgaagatggccccaggatatgcaatcttcccctgttctcccccgatgtcatgccgttctggtctctggtaggctgggagcccagtcagctttgcctccaacagacccagtaatataggttaacctaatttgaatccaggcgttaaataagagcagtcgccgccccctccccccccccccgcgagcatctcgcaagttttcttccttctgtcaagaaccaacacaagcgacaaaatccaacccagctatgcagcacaccgcaccaaacatcagcccacacgtcgtgtttccctgtgaaactaccgtatacgacatcaactccactccggatgccgcagaagcccgaccaaaacttcaaacataggatggtaaaatggtaggggcattctctctttccagcactcgatcctcacaatgctctccctccccccctccacattcaccccctccccctccctcattttccttcatttcttcttagttcctgacagcccccaccaaggatggaaacggattaacttgagttgccggacggccacgttccccaatcaagcacctactccaatcatgttggctggttatgcgctcggcgtgcacgttaatgtatgtgatcgagccggccgaatgtatttcctttggccgaattcatggaaaagcttccatcatggcatgattttcttcccctttacgctcaatatctcagcaccgtcaggcaacggaggatggcttggatggtttgcggggattatccgcgcgagatttgtgtgggaaaagccctcctttttgccaagaccggggggttgggtccgggtacggggaagggtccgggtcttggtgggggacaagataatgacatctcactaacccccactcatgaccctaacccttgattaacaagtcaatcctgggggagggacaagtgtgcacaatccaagtggattgccggtgtcgaacccttgtgccggtttcaataaagatacttgctctttgggtttgaggatctttggaacgagttcggtatggggaatgagtggtgttgattagaggggccggagggatctcatgccggggctatggtgatccgaacatggggcatcgatcgccgagcacgatggaagccagcaagcgactcttttcgattacatggtggatggaagactgcaggatggggaagactggaaaggaaacgggagcaatcacgaacctgtcgcgacgagcgaggacccggtctggcgacgcgaatacacagcagcaacattgcctgggaccggccatgggcagctgcagatcagccaaaccaacctgttcatggtcgggcgcctccagccgcacgaactccgcgccagggggggtgatctcttccgacttaacagcccctcgacgtcaagatggccgtgcgccatctctgcttatcatcacaaacagcgtacgccattaaatttgcgatggtttacgctcgcctggaccgaaatcgaaccagtcagagaaactcgtatcggtgttgttgagaattagcgttggaagattcgaaaacgccttgccggcttccggaagggatacccgccgccttcagagcaccctggggagctggaaacgattggggagccagcaatcagcaagcagggatccttgttgaggaaagattgagaaaatgagagaacaaatgtgatagaaacagggtagacagacctaagagcctggcctttaagagaggggttgcccacaacaatcttttgccctgaacgaacaattccggtcaccgcaggaagattgaaccccgttttccccttatcctccttctgctctttctcccacgccgctccgaaacctctcccggtgtgtctcagcaacctatcccgcgaatattcacaaaggcgcaaacatgggttgcgaccagagcaagcctcagtctaggtacttggctcttctgcgactcttcacccacattcggcatcactaattgagagtctctagcagcggaaaccaaaagccaaactggcagaggtccgccaacggccaatacgtgggcgcacgtccagtatcacattcttccaactccacagccgaaaagcagaccgcatcgaagcccgcaccgaagaagtaataggagcaacacccgggggagacatccatatgtggccttggcgtgaggacgatggcgggaagatcggtgctgcactgcaccagggggtttcgcgcttgtattttgggcgtcatcatatagaggattttgtatttatggggatctacagtatttacttgcaaaggcggcctctagaagataggttttttttgttttgcttttacatgaccactcttgcctctctggatttgtgcaactccctccaatgtgtgtgtgtgtgtgtgttgaccaggctcccaaggaccccgcgttgttgctccacaagagcggccgacgccatactcttttgacgttgtgacggctctcaaattgacatcggtaccaaagatggattctcctggctatttctgtatcccgccaacaactttgtgtgacggtcatcgtaaaaaacacaagttattatactttacatgtaattctttttttaaaaaaaacaatatctttttgtcatcttgcttcgtgtttcctttatccaagcaacatgtgttctttatcccagctatgtttttccatcgtcccagctctatctttccaatgtcccagctacctatactctttctcccaactacatctgtattttatcccagctatacacgccttttgtctcagctatattcactacttacctcaggtgttttgaccttttgcgccagctatcacggcgcaggcattatataacgcatggacatggcgatggcggctagggttgtcaccagggggatcacatcagccatatccacctatctaaccctcgtcttttatcccaacctactcccacttgatctgagcttagtatatctttaatccgagcttaaactgtccatttctagacaaactctgtcgttaacccaagctgagttcgtcttttggtagactaaccttatatttagtccgagtttaggccgtctttccctagatagcgcttgtctttgatgcaagcaggtaagccctctaagggttcgtcgatccgagcttatggataaattagctgagaattctatataatcactgcgttaccttatatcaccttccacaaagtataaccataccatttcttccctaggatatttactgcaatctgcaacttagaagatggagcatgtgggtcatgtccgtgctgaagccatcacggaactttcttcagtgctccacccatctagaccctcttttgacagctcgcttcgggacggcccgcaactctaacttatagtagaggcagggaagaagatggttgttgaaagaatgctcgtaggtgtacgtgttgacgggggaagggggaggattaaagaggtagatgttgggaaattggcgcgtgttatgtctacctcaccggacgtgtgatggcgttactttactttatcattgttacaagcccatattgaagcattggggcgtgatttgagggcagcgctctctggacgcccatcgaaaccaacaataacatatccagcaaccgataaataatgttttcattgctaaactacccatgccagagtcaagagtgcagaaaaaagtaagtatttattatttaggtaggccagcaaatccggcatgctcaaagtacacagtaaccttgcctgtagcctgatcccgccgtcgatttccggcttgtctactgatgttatgaagagaggacgcagacgccatgcattggtatatgtgtacaaaatgtagtaacctccaagaacaatcactcctcatcgctgctatccacaataaaccctgctctaaccctcggtcgcgctcgtactggcgcagcgaccggcatgtcgtcatcggtatcttcctcgccaccacccttgtctttatcaccaacacctttttcacttgtctgagtagcagattgcatctcttcatccccatcatcgtcaaccggcttcttgctcggcttcctctttttggcagctctcttagccggcgccggcgagactgctgaagatgatcgctcactttcatcatccgctgtattctcctcgtcatcatcatccctatccatatcaacgtcctcatcgtctcccaaatcagcagcatccgactttctcttgccgcccctcttgacggccttcttcggttttggcctctccaccaccgcatcctcgtcatcctcctcactatcatccccgtccaacaacctctcccaagcactcttctccactcccgtcggcttctccttctccttttccttggccggccccccgtatgccgccatcgtcttctgcctcctctcctcctccctcgcaaaaaactccttatccgcctcctcatccgactcatcatcgctcgccctcacatacacctcactcttgatcttcctcaacttctccagctgcttcagcttcctcgccttcgccctcgccgccgcctcctcatcatcaatctccctcacctcctccacctcctccccatcactatttatcgtcatcctcttcctcctcaacttcttcggcctatcgcccgtagggttgatcgacttcaaccggcccgcagcaaaaagcggctcttccccatcatccaaaatatcatcatcatccccatcatcaaacgccgccctcttcctcggcgcagcttttgtcccagcagattttctgcggagttgatcctccgccagctccccagcctcaaaagtagggggctcaaactctgccttgttgatcatgttcagattttcctttagatcatacgcgctcatcctcccgggaacgatccagaccgaatccggagtctcatccaacgtcggcgctaacctctcaaatccaactagcttcatcaacagcctcaaatgcgggttcttgaacattgccgttcggcacttgtcattggatgggtgtatcactacaaggcgggttgtcatgttagcgcgcacggaccaaaagtaaacaaccgcacaaggctctgtgttcaggggaaaactcaccagtatacggcgcctcaggcaacaaccccaccaccacctcaccatccgttgtcgcccccgactgcctcgcctcctgttccccctcccacccccttctttcactttccgcctccgccaaagtcttcttcacccactccaaccactccgtctggttcctatccagcaacacccccaccacaatcgcaatctgcgcctccttctccagcatcttgtctttaaactccaactctgcccccggccgggggtttgtcgaaaccgagctcgtctgcctctcgtagccgtactcaaggtaaaacgccgtttgcttttctttgctgaacaacaactcgacaaacaacgccggtcgctcttctagcttcttggtgcatttcctcaaaatctgcttcaccagctcttcccactctttgtagaccgacttcccgacagtggaagaatcaagtggctgagggcccttgatcatgttgtaaaacagggagatgatgtccagcctgaagagcatagtccccatctcatgcttaaacaccacccgataaaaatatcgatgcgcacgcttgagttgttcgggagagaggtcctggtaaaagtgggtgaacttgacaaatgtgtcaaccacaccctggggtagaaatctcgtggcgaactgggcaaagttgaatttgcgctcttgggaggtatgctccgccttgcgggcatcggcttcgtcgtcgtcatccgagacggggttgacgaggtcttcgtcttcttccgcgtccgagttggtccccccagcggcaacagcctcggcctgtttggctttcttcttcttgcgggttcgtcgccgggagcggacttgcatgtcgacgttttgcttggagtaggcttccaagatgcgaaggaacgtgtgggtgagttcggtacaggcgtcgaggtactcgaagccttggtctttgaaggtgcgcgcgacgctggcgatggtatcgtgggttttttcttcgtagaagaggttgctgaggaggttgtcggcgatttcttcgtcttcttcgttgccgctgtcggtcatctcctggatggtgagcagtatctgggtaaaacaacgcatgacggtcgtcagctggggccaatttttgtccgtgtaggcgcgatcgaggtatctgttgagggtgatgatcatctcgggctgcagaacaccggcgacaaggttgaaggtattgacatcatcttcagctactggttgggcaggcttcttttgatctttgttggcttgttggcgtactcgttcagcttctaggaaccatgataccaggtagaagaactgagccttgtggctttcaagaacgtggctcgcttctcgatcgatcgatcgctggaggtggaggaatagggggttgaagccagagtcgaggaagtcagagacaaaatccttgagctgttgacgggcgcgttcgtcgaggttgacaggtagacctagctccttgtccgcttcgtctttccttgctcgtcttggtgccttgaaggttttggagccgtccatcttccgttctcgcgcagcagggtcgagtaatgcgtcttgaccagaaactgtgactgttctcccattttccctcttcacccaaatcatggtgccaaacctactatgccttgatggccccttcttgttgtaagacctcagcatagccgcctccttgttcatggcggccgtcagctcgtccgtcttgatcttgttcagccgcttttcgctgacaaaaagcttgctcgagtccaccctcttgagcaagtggaataatatctccaggataatgacgtcctccgtccggaagtcctcgcccatgttcgatgcgattgtcaagatggcaaggaacacatcttggaacgagaaggcatcaatcagcgctgacctcgaaatctgggattcgtccccctcgtagttgacccctggcggcgggctaatcatggcgatattccgcaggaagtatagaatcaacttgatgataccctgatctcttgctgttctgtctccaatcgacaaagccatactcggcagagctaccctgatcgccgtattcaaaatctgcgccgcatcaaagttgataatcgccctcttgtaattcagctgcgccaactgcaacactggcagatgtctgtggtggttgaccgtcatggtctcggggtccttctcgatgggccaggtaagcggtaccataagctcgtagcacgccaacgcaacctttgacctgtatttgctatcattgtcgcttggcggccataaagcaagaatctggaggagatcggtgcagacaatattcgcttcagcgaggcatcgcgcaacgtccatgcggttcgtcttctcatcgtagaatcgaatccatttcttcagatcgcgcaggacttcgagggcgtcgtcgccgagtttatacttgtcgtcgtcgctgtctacactgtaaccacccagctattccaactgtcagccaacttgtgtcaaggatcgctggcgggaaagcctaccgcagaaacaagactgttgatgtgcgcccgcacctcggggtgcacagtgtcgttggggatctcgttgtcctccatgtcggagtattattctcgaatttcgtttataccagcatacggtcttcgtctatcacgatactaattcgaattcgtcgtcgtagtatcttgtttgctgtggcttggcgctcgtgggcatggaaacgcgatgctcaaacccattaaaatcagacgcgactgaccgcgtctgcccaattaaaacagacacagtgcgctcatagtgtgtgtcttggagctcgcactatcctggacagggcacatggcagagagtcggccgaaagcagcaatcggtccgggggtggcccttggatttaccgaggctagccgacgtcactcagtccgtcgcattcacaagagagcttcattctcattttcactcttttttccattgtgtttgtgtatttcaggtaaaatggcttctatcatgtcggctagacaagtgctccgtctgggcaaccgcctcagcgttcggtcttactcatctgctgtcaagcatgagggcgcccgcgatgtcaagcgtctcggtgttatcggcgcggggcagatggtgagcttcctcttcatgagatgaacatagcaattgtagctgacatgagatgaacagggtctcggtattgcccttgtggctgccatgaaggcccaagtcccagttaccctcgtcgactccagccagaagtctttggataagggccttgtctttgctggtatgttgtcactaccaaccctgaaccagacccgttaaggggcaacccaagccatggaaaggggcactcaagccaccaaaaccgggcttcaaccacttctcattaaccctcccaattctctttatcaaccctggcccttcattttccagtatcaattttgactaacgactcccagatactcttctcgccaagcaagtcgcaaaggagaagctcactcagttccaagctgatgcggcgagggccctcctcctccccaccaccgccctcgatgccctccacgaagccgacttcgtcatcgaggctgtcccagagatcccctctctcaaattcgagctcttttcccgcctcgcctccatcgctccctcccatgccgtcctggcgacaaacacctcctccatctccattacccgtaagactcccctaaccccttgctccccaccacaccatgttgacacccatcccaggtattgccgccgccacccaggacccctccaaacctctcgacacctccgcctcctcccgcgtagtagcaacccacttcatgaaccccgtcccggtccaaaaaggtgtcgaaatcatctccggcctccagacctcccccaccaccctcgccaccgccgtctccttcgtcgagaaaatgggtaaaattgtctcctactccgtcgactcccccggtttcctcgccaaccgcatcctgatgccctacatcaacgaagcaatcatctgcctcgaatccggcgtcggagaccgggattccatcgacgctatcatgaagaatggcaccaacgtccccatgggtccgctccagttggcggatttcattgggcttgatacttgcctcgcgatcatgaatgtcttgcatacggaaacgggggatagcaagtataggccgagtgtgttgttgaagaattatgttgcggccgggtggttggggaagaagagtgggaaggggttttatgagtatgcccaaaagaagtaagtgggcaggagaggtgctgtgtgtgttatgatagaatctagacagcgtttttcatcaagccatgtatcaatgcttatatatgtttacatatctgttggttatttcacatctatccctctactagagcatgacaccgcacggtaaaccactcagatcatccccttctttccattgtcacttacctgcttcaaagcgcaaaaccagtcgccctctaatacagaaacaaacctcatttcacgtctacatagcaaccacccccttccattaaaaaggggcaacaaaacaatccactccctcaaccacacccagtacccctcagcccactttccgtttaccaatcctcaccgctatccccccattgaccatgcactcaatcaaaatccctctgcacgctgacaaaaaaaacttagattacaccccgcaatctatccaattttctcacctccccgcaaaaagtagccgacaccactcggtagtgctttacaaagtgcccaatattttcggcatcagtctaccaggacagcagcaaactttctcacgaatctctttttgcttttctcctcctcctacctgtcggatgaaccggccgacctgtgtgtgtgtgtgtgttgcagttttaatctgtcctccccccacccgtcaccctacagaaacttagcagttgaaaagctattttcgtcccctctatttgttcattcggcttgtcccgaagccagccaggttcatctctcgataaaccatcacctgggagcttgtgtggtgagagcccgctaatctcgctgtgagatcttggggaggaacaggccgtccttcactggagagagatgagaaggtaaccaaaaactaccccaagcacaccccaacaacaaccaccacaaccacaaccacaaccacaacaacagccgaccaccaccccagcccaaccctctccttccaccttccccttcccaggcaaaactccccatcacccatttaagccgagtgtaatgtgaatcagcaacaatgccgggggcacccgcccctcccggtccccatcccatgacagccagtaaacccccctcccgtacccccagactctcatatagtacctaccatgaaaagaacggatcaagagcaatatattcccaccccgttagtcaaactagcccgaccccacccacacacatcccctcaaactgaaccttcagacggaagttcccagcaatagagaaccaaaccaaatgtggccaactctgacggccggaactgtcgtgtgatatgtcaacaaaaagcaacagctaggttcgggatgccaagaagaatacctctcgttggtggtgatgttctgatatagggggtatatatcataaacaaacctcaaggtcttgatactcctccctccccgagtgtccggtggtcaggcaaaaaataacgaaacaggcatgacatcaatcttcccgaaaccaaaaccaatacgctctcatcacggagagcgacgaagcttgtttcttttttccttgaagcggatcgtcccagcctccatctgtctgtcatgcaaatacatccctcacaagcaaaaccggctgacaggaaagaaagcgggcgttcggaaaaaacatggggttcatacacacacacacacacacacacacacacacacacacacccacacacaccacacacaatacagcaaaaaccatgctcccccctcttcggaaaagcaccccgggctcacatcaaaaaaatccggtgtttcccaaaggggtaaaaagaccatcccatcctgttcctgcgtactaggagtagaccatgccatgcagagaagcccgcaagaacggggatgtctcgcctcttgttggttaggtaccacaagtagttttcccaacttgctagcccgaatgtcgtgttccacccctgtgtggaaaaccaagcaagcaggctccgagtgagttcgaggtagttatctatcgatcgtgaactcgagaaaaagcagaatcaaccaatgggggttgataaacaagtgagggaagaaacagtggctggcaaaaacaaaccaagacctcctcagcttctcccggcggcggccaaagattgagcctggaatggcaagccgagggaaaacccccatgtccgccatttttaccggccgggcctagaaaaacaaaaatgcctttgttgttgttgttgttgttgttgttggcggtaggtagcttggagcttacctccaccataagaaaggtggcttccaaaggaaaaactgacgaatcggcacaaatttgacagctttgttttgatcctcggtattgtgcttggatccgtcagtctggtcttacagcacaacacagcaatgccttgtaacgggaccaaagtcatgtgccacacaagtcaaagacagtcccatgcctagttcggttgtatctcaggaatcaggtgaatcatgcgtgctcggtgttgagtgactcctctggtcgatatcgagttacatccccgttgagtggttctcgaaatcagcacggctattcgcgcaagaaggatgacaggcatctccactaccttcgcaagcttatatatggcgggaaacattatttatctcgaccttagaaagcattttcgatcagatcgtcaggttgggggtctcgaacaaacaaacaacatgacctagaagctgtacagccaggaacgcagtgaatagtttgagcaagccgcgtttgacaactcggctaaacagacccgtcaaaacggttcaaggacaagcgattcgcgcccacaagctctcacgtcacggtggtaagaaagtcacttgaaggaaagccgataatcaccaacgttctgccacgccgtgtttgacaattgcgtgatgctgtaccaggcgcctgcgatattcttcgcctgagtcgcatcgttgggctaaagagttctctgtcgaatcgtaaacatgccggcagccgtgtcacaagatgtcttgtgaggagctgaatgataagacacggtttgaccagcagccattccacgaaaggaaggtcggacacgccagcaagtgctggagaagcaggtgcgtctcttcgtgggggcttctcctcgaggctcctccgaatcctgacaagcccagaaactgctctcgagcagtctgcgtcaaactgcgccttgagcgcaagcgagacagcgccgtcacaatgcgtagcatgcgttgctttgcacgaccggccggattgatgagtccacgtgtggcagaatccaagttaggctcgcgcaatgcacaatgcaggctgcacggctcgatattaatgacggtgggtaatgtgaggggaagcctacttggtaggagtgtgtcaagcatcctcggccttgtcgagtgcttgatgatgttccggtggataaggaaatgcgcaagccatgtggaactagaactgatcctccgaacggtcctctaactcttactttgtcgaggccggggaagcctctgaactgatgggacatgttctgggatcaatggccttccttcaaacgagcctcggaaagcatatctctgcacaaggtcctgccttgaaatctgagccatccgtttggtcagccgcttgtgtctagtataggggatattttgacaccgtcgggttgtagcaacacgagaccgactcgctcgccttgaagctggcagagctctggtgatactgagtgcaccgggcacttcgacgtggccctaaacgcagaaacggagggttcttcgtggccagcaaggccgtacaagtggcccgtcgccatcaggccgttggcatgacgtctagctggtggtaaaatgcggcaaaaacagcgagcatcagcgcgtgtctttgggcgtgggccgacagcaaggggctgggtctcgatggtttttgccgccagctcgtggcctagagaaaaatcttgccctggacggagcatgttgcaagtcttgtcaagggttgtggagggagacgcttgatgtcagccccctttccacccgctcctgcagttgagattctgcaactcagcgagcgggttatttccggaggacgacgatgcgacaggttcccatgttgattcatcccatcccgctggtagcccggggatcgatctgacgagctattgactgaatttgagtgcttcagtctgctgccgtgtgttcgccctgatgctggatccacggggatcttttgtgtgaggactggacagctgatctattggacaatcagacggcttcttgcattcacaataggggcccgtatccagggttcctggattccagatgatcgcacaaagttctcgccgtgcttcatctgcaggcacgcggcttgcgcaacccggaagtcgagattgtgctctggctagaattcgtgtttgatccaaacacagggatggtggcagctcaccaacgtctcgcaagcagattcaggccccgaacagccgtcagggcttcaaaaggtgaaactggatatctgatctcgtcgtagtcgtgtactccgggaaccggaacctacactcgcggagggtgtaactgggaaatgccgcgacgacaggaatgacttccacaacacgaagatggtggcaactgaagagcccattccgggcaaccatcaaagaaataatttggacacgaaagacctctcgccctgccaaatgaattattcaggtagagaagagacactccgacaccaaccgtctgttcgtctcaacaacgcggcatcggggatgcccgggtctagagctctgagcccacttctgccaggaagcaaacagacatacaggaccaaaaggcgtaagaagccagcacgtgcgctcaccgttttcgcgctccatgtacgagacggttgtgaaatggatgaccgtcgggaccgacgagacagttacgtctgacgcattatccggcaccgtcaaacccgaaacaggctgagaatagcagtgggcaacagagcactccaattcctctccgtggagtctcttgttgccacggtctggcgtctgctattcttgttgcaagggctcgccatctaccctatagataggagcttggatgcagcagagctgacatttacccctatcagatgaagctgtggggaacacagcgagacaagcgcagctgcgtaagcgcggcgtctgggtaggcggtagaggcgcgaggcaggccagtagccattcagaccgtttgaatcctggggtaccagtgcagactttttgctgtcctgcaactgcaaggcacccgatctttccactgccgagagaagtcagctcggttttaccgcggcgtcttccaaacacctcggcatcatgccccgtcagccgcttctttgagattctcatcagtcgtgacgggaaagtggagaagtcaagaagggtaacgcggaggaggactggagcggcccgaagaccggagcacaagccctaaggatccggtctgtgccgccatgcttctcactttcaccaccccgaggcagctttgggaatagtccaggaacacgctcggcgcacgatgagatctgagcagcaccggacgcaacggtactgagcggctgcaaccacccaccacacccgtcccgctaagcccaatacaagcaacgtgcgggctgcgaattctttctttgctttgccaatttccctgccagttgataatgcgttgtttatgtcgtttcaagagattatggcatgtctggtagagtccgaagaaattccacgactgtggctcgcgggaatttggcttgcacgatcggggaatctggggagtctgggggatctgggctctcggtgtcgacaatggcaaagcgtggtgtcgacagtaaaggaacggacaaccccgaagtccttaatctgacggttaactgctgcatggcgcatggcggcatgctgcataccgcaagcaagtccattgattcgaatcactcacctcggccttcacctggaggagacctgggatgcccggagacaacatgtgaggcgatggtggtgccttggtggtagccgcatactgtcggatgtaaagagactgggttcttttggagcatggaaaaaatatggaaggtggtgcttgcagcctcgaccaggcagccaagaccaagaaagagagctgaagaggcaggcgcttgtttgagatttttcttttgcattcttcggtgtcgagccgctctttccccgggagtcgccaaaaagcttgaacactgatcgtgcttgccttgtttggtcaggctactcactgacgagggtccaggccgttgaggccaattctttcttcccaaaacgtcaccgtgattctgtttgattcgcaacgatgaccatctaggcgatgtgtcattcagagccaccacccaacccccggcaaaccactacctacctatctattggatgctttccgctgcagtgctcacctcttcttcctgacgcagcagtctgtctaggttgtcggattcctcgtcagttttctacttgataagatccaatacttctttggtggaattgatccatggtcccgtctgcagaaactgatggtccgggtttaacagagaagcgccggggccccacccaggatgccgccgtgagaagtcaactgtcacccacggagccgatgtctgacgggggacggggatcggaggctacactggctccacatggccccaatggtccgcgaacagacgccggcatgcccaccgggcaagacagacaaattggcagcgatcccgaatccgattcgatgcatgccatccatcagctgttaggtgctgctgcagttgcagtagagggtgcgaggccatctcctgcttcttctggctgctctgcacccctgattgggacgggtagcatttcaacaatcaactgctagatggaagccagcctcggacagccgctgccttccaacctctttgggaatggcccctcctgctacatcccccatctcgctctcgtctggcctcatcgttgccctaccggtacctacgctagcccctcacagaaccacccctggatgaaaccatggaccgacccccctgctccgagaggagagatgccccagcactgcttggctcacgatcccatccctgctcgactgttagcggcacggcaaggggcgtgcaagtaatcgagacttggccggctcttctcgcgacacctctccgtcctgctcaatgcgaccctctggctgcacaacaccttggctctcctgtagttctcatcatacagttgcaccaaactccaccgaatccggtgtactctcctctctggtgaagcgcccaccatatcagcctgcggctttgtcggcgctgtttcccactcctccgactgcccaccccaagggcccaaaccctgctctgtcagaggccacaaaagacaccagctcttccatactccggcactgcgcacttacaagtgccgtgcaatcgcaccagagccgccttgcccagtgccgccgcctcccggaggcgtctggacgcttagcgacgttcgagtgtctcctcccaagcgcacctacgccgcctgctccaccccatcgttgctggcgttgcgtgcctctgtcagacagaagagacgggctcggcaagacgggctgacaggggggtcaacagacggctcagacaaaatctctcttgtcagcgtggttccctactggctaaaatggagcagtcactgtgaacggcagacctcgttgctcacacggtacaaccttcatggtcatcaacacccccagcactgctaccattgcctcgacagtgctccagcggtcaaactcaccaagctacaacgatgcagaatatctattcacccgtgatctaaccattccttccctctaaacgccagcttccaggacagaaagacctaaaacctttctctactccacatcccgcaacaccacccgccctctacaattgccgctttgagctatcgctgccccgatcttgctgttgcggaggatgccagtggccttgtcacttcttgatccgatctgggtccacccccctcccctggccgcgcaccttgttgcccaaccacgcccctccctagtgctctcacacttgccctttttctcccgcagccaccaagcagcagacactgtacaccacgcctctcctccgagtaggatcgacatcgatgattggcttcaaggcttgaggcaacgtcgacaacggtcatgctttcttccgtggagtcgacactgagctaatgtgaggcagagccaatcacccgcccagaaacgctccagccgagatgccatgcacggcttgtacctacctttccatgcatctctctgagcgttcttcggcctcgtgctgcttgctctcggtcttggggcgctctgatgttcactgaactgtggagcggttgcgtgtgtccctgcactgtacagtgggacagacagtctaggaggtcaggattgctatcaagaggacacgagggcgaccatgtacccagcggtgcctgctcgtaacccatggtagagcaaccgtgtctcgtctcccttgagcatcggatgtttgcatcggtgtcattggtccagtagactccctctcgcctacagacaactgcggtatgctctggcactctgaccatgcccaggtccctgcactatatgcgatgtgtatgcctgtgtcttcacgaccgccctatgacggacccatggcacctctccacagcctggtcaacttcttcttttcttctctcaacggccttacttgcagcaccgacgacgttggccttggcacgagcgttttcctgtccgtttttggcctgctttcaagtgccagcaactgcccccctgttggttccatcaacttcctggcacggcattagccattcagccgagatcttatgggccagctgccacgatagagttccgtcactcgcatcaacccttgcctggccagaaaaggtgagggcagaagaacggtgtggctcagctcttcccccatcctctagaaagcgaatatcacaataccggtggccatagcttgggggtttcgtctaatcgaaggcccatccactgcccaccccagacaacacacagggcccccagtagacttagccgttaaagctaccgtcctctgtcaggtaccaggtaccccgatctctccccagccctctcctgccactgttgcggtaggccgtgcagcccctgtcctgtatttgaatgcggcctcgacatttctccgtgaggagtgagccctccgccggtattaatcctagctctgtcctaccctggggccaaggtgctgaggaaccgtcttaataccaccaagggcaacccacaagagcttcatagctcccgccctatcccattccacgggatcatccaactgcagacgggcccccgccgagcatcttcctggccaaccttgattttatacaagatatgttcctgcctttgggtccctggtagccaaggaaacctctcccctttccccttcttcccctttgccaaccacgacagcctctccatcacccaaggcgacaaccacggttcgccagacctcagcttggacagcgttcgtgtagatcagttggttaatacccgagccccgtggtttcctgtcctcgccagcacacacacggcggctccctctgatctttcttttcactggtgggcctggtctcctggtacgacgcatctgcacatcaaccccaaagaaaaatcgcgctcgaaccgccaccgcacattttgccctcctcagtgcactcatcctgtttgatcatcgaaaccatccggacccaactctcgctcatattcgcatcgcctgggaactttcagtctttggatgccaggatctgccgggcaacgatcacctcgaccgaatccaggacagaggaggtagcggatccgcctacctggcgctgtggatggtgatgtgtgctcgggatttctgatatactcgttctgcgcaggccggcaacgactctcgcttgattccatccagaccgcctctccataccgaccactggcccctgagcccagccaggaactcctatcttcttcaacgtcggtcgacaatccatcccaatgcttgttaccaggcaaagcgctccggagcagagttcttggtccattggcaaatttgaaacggcttttcacaagtccgcggaaagcctacgtatgtcgaacagctacgacgcggtgacgcagtcagactggcagggtcagtactcatttctgccgccaggagacaacaacatcttctctcagtcatatgaacatgtgacgggttcagtggaccatgcggattcgcaagcgcagccgcggagtgtggctgcgccaagcaacgccttagacatcgaggcgccaaagcgggagagccctccattgggacaccaccgcttagatcctcttggtctacgacagccaaagcagccatcgccaattccagagcagcctggaaaccaaggggaacaatatgcgcaaaaagcaaccgagtcggcacacgaggagccattggcatcgaccgagacccccggcatgtccttgggctccaaccccctgagttcagtatcatccacgggtcaagggcctgaagtaggcccaggtcaaccagggaacgagagccagacggtcatcaaggaagaggatgaggaggtgctggaggacgaggagatgatagaaggggacggagatggtgatgctcagccacaacctcagactgcggctgagaggaccgcccagcgacgcaagatgaagcgcttcaggtaagaatcagggaatttttcatggggaaaatgggggtctgaccgatgttcacagacttacgcaccagcaaacccgatttctgatgagtgagtttgcgaagcaaccacacccagatgcagctcaccgcgaacgtttgtctcgcgaaattccgggactgagtccacgccaggtgcaagtgtggtttcaaaacaggtcggtcttcgcttgacaagccattcggctctaaccattgctgatatcctgctagacgcgccaaaataaaacgtttgacggcggacgatcgtgaacgtatgatcaaaatgagagctgtccccgaggactttgacaacttgggcgctctccactccccatacggtgcagttcatggactgggagcccctatggcgtctcctgttgatcttggaggatcgtcgtacgaccatatgatgcgcccgctaatggtggatgttcggcgatctgatggagatgagcacctctcacccaccggtttgagccctgcctttggtagcataggcttcaacccttcgaactcgctcagttcgcccgacatactttctccattatcaccaacatcgaccgatcgctacggctactcgagtcatatgtcgtcgggacctttgagtggtgggccaagaacatcgaatccatttgcacgacagccaagcatcgacagcagcatgcagatgcatagtcatcattcgagacaacaaatacggcccctgcagccacttcacctccgagataccatgacgcgatcacgctccgactcgttacagtcgcctctacgatccagcatgtcctggaagggcgattctcttgattacactacttaccacggcggaaatccatctcctcagttaggtggtcggccacacgggttgtatcagcaggatcaggttggcggatcatctgggagcgggctagggggctatgattcgagcagctactctggtaagccgcggcggcactgcagttgaatctcggtctgaaagccacaatgctaacccaaagcacaggctctactgtacaatccccaactcacatgaactacccgaattaccaatcctctagccttcaacaaagccaacagcgtgggtcacgtctgcgagccgcctcggcctcattaccacttggcctcgatcttcgaacccagtaccggtcctctgtcgggtccggcagcatgcaatcagcgactcattctccaggtccacgcacgacatcaacctcacaattagggggcgtgtcctctagttataccgcgagttttccatcggcccctcttaccgcccctgtcgacttctctttgcctcgcacgcccggataccggtcaacaggaggtgattattcgatgccacaaatgagcgccccgatcgcgccaccaaacgacttttcccaggccttccaagcgagcatgagcaattcgagctcgaggacaccaataagggattcttttgggggtggtcatggacctctgggcttgggacagcagagccaaagctcagtcgatcgcaacgatgactattcgcaagatccgctcggtatgaagcgcaagcgaagctttacggcggccacatcttctgcgaactcggggccgagtgtgtatggagcaacgtcatgaaagagagcatcattttgggctaccatttccaaagcacacaatatttctctcacgtcgaaatgtacaaaaccgatacaataactactgttacaccacctcttcccccgcccccccccaatatctaggagcggcttcttttttcttttcctttggctcggtagctttgttttttttttcttctttatttggctcggcggcctatctatcttcttctccaacgaaaacacgaacgagaaatacccaccacgattggctattttggaactatctactatgatgacacggcggggaacgatttgctatacgttttttgggtacgcacgcttgaagcgatgggtggcaggcaatagtccgcattctacaatgaacgggtccggttgtctacaatacaataccatttttccattttttatttttttgatgatgacaatgtatggaaaaaggcggactcattgggcgaaggaggtggttgtatttttttcccttggggggtggggcgatggggccaggtattggaaaatatcagaaaacagatgtttggaaagcaacttttttccacattggagcgcattttggggggttgttttcgtaaggtatggtacgcattgtgtcgttgtgtggtgcctagtctatttgctgttttggcgttgggttggtaaggggaagaagaaaggggtaagggttagggtacggagagggacgttgaactcgcaaaaggcttcctaaaggcaaggcgggttggggtggttcaagggatgatggatgttttttcatggtgtatataacacattggatagacaatgaaaacacaaaccctacacaaataagctttttttgcccacttattcagatctagacgcaacacagaacgacagacaacaagatggagggcacctcggaatctcaggggaaattcagaccatcctatccccattcccagacctcagccaaagctcttttcctcctaggtagggggtaatagataaaaaacaactggataaccacaaggaagatggacctccgagatagagcatcacagcgttacgttgactaggtagaggactacacacgggctgggatggggatctggaacttgcaaactgaatggacaggactggacaacacacggcatttttggcgggaggcggaatacgggatggccgtccggtcgggcgggttaggttggaggtggtggtggtgccctttttttttgacggcagaggtgtggtccgtttgttacttttcctcacatacataccaaccgaatagcaagtctactgcttactacaccgaagctaagctgagctggggttttagccagaatctttctcgtcggtttgcactagagagatgggctagtgaggggggaaacgttgcgctccaaggacggatgatgccatgccatgggctgaaaagcaagaaaaataacatgccctcttgccccctgtatctcgtctgtatcatgcttggggtaggtaggtcggttccgtttgacagaccgggcgtactacaactgacaggcccgctgacgccccccacactcactttcacacggattacatacacacatctcaaggtaggtatgcaaccaccgagcatcattatgcttatgcacctatcttgcgtcgcgttaatctatcaggaccacccgctgaacgagaaagtggtttcgacaggagatcttgcatgaggtgttcagcagcatcagagcaaaattaaaagccacatggagttaacttatcaaataaatccggagagggcttgccgagcgtggtaacccaccctccattacatgcttgctcgacagtcgggtaaggaacaatgtccgtaggtatccagcccgagtttctcatctctcaggtaagaggaagcctttgttggggagtagcaatgtgtcttgcgagatgacctcaacacaccaaaatttctatatttcttttccttgatatcacggcgtctacctagtgaggaacgttgatgagaccacagagggaggtgcgtcaaaaccaacctaggtaggtaagtgatgagattgcaactcaacgaaccattccatcccacccactgatcccccaatcttggtaaatgcacacacactgaattttctcactgtcagatcataattacacaatgccatcccccaaaacgttgtatctcctcctggcaggcaggcaaagctgtaatctcggccgaattcctcggagccttgccctattgttgtgatgtaggtggttcgatgctgctgtcctcctctcagcacgacatgtcgacaaaagcaaccggcttcccatttacaagccacaactacctagcccagataggtgcgtcattacccacactgagtgaaaacgggccgttatggaacaccgagatgaggccgttgcgtttcttgcctccctcaaccaaccagatgttacaaagccagcctgatggcgttttgggggccttgaattcctgacttgactgtaacggtgcatcttggtagtagtaattacctcatctcccctctcactcaggtacacgagcgcctctccctccaaccacacacacacacacacacacacacacacacacacacaaacactccagggtagtactgcaagtaagatctgatatgcaattaagcgtgcggagatgccgacgacgacacacaaaaacaaacagaaccaattcccgctccagcgcaagccaaatgacaaggcttgttcatcaagcgggaacgtgctgttacggatatgagagagatagtaatcaaaaggcgggcggaaacacacacaaaccttgcccttcggcaaacggcgtcgcgggaagcccttcggcggaggcatctcgaagtcttcccaagtgggaaatcccactcaccacgcaactacttgtcatcagtaccatctttttgccaaaacccgcccacagcccgccgtcgcaatgcacaaacaacatccatgatcatgatccatccatccagacaaaaccaggcggaacaaaaacattcccctgtctgtcgattcaccagaccgtcatgcttgtttctccacgtctcccatcatccaacctcttcacccagtagtggtattatcccctactttctctgaaatccctccaggtaccaaatagtccaacaactcgccccaaagtgaggggtggtttttaacctgttgtctggggtagtcccggggtcaaggtctgatcggaaaataacagaaattaaaaaaacgtgccctccggttgtttaaacttgcggaatgaaacgccgcctaccgctttctgattggcacgggaacatatgctattctacaacagcagagtcctgacagcagcagagaaaggcgcaactttctcaatgacgcaaagagatcgtcgctagtgccgtggttttgctgctacgttaaactcgacatcaccaccaccaccaccaccccgcaccttgatatttgatatagggaaggggggatgtgatatcaatggcgtgtgttggcttaaaaccttggacatatcgtgctagaaaaccgggaccgggtgggggagagctacttacacacgcttgcaagcttccccagatctttacttcatttcaggcagttgaaccggctgatctactttcaccgctgtcattgcgcccctaaacccccagcccaagacttcacaactcccggagcagaaaaacaacatgtcggactgcccatcagggggcctaccctgcatggtgtaactctctctaccggctgacttatcgccttgcgcactggctggggcgcggcgggggcatctcttcggggtgagactgcaccgatggtgcccacgatgccgaccaggagcctgtcgtgttccccaagcaggcgtccatctgcgggcctgtacaggccggtgctagcccccctccacaacgtgatgctcgctctgcaagccaacagaccattcatgtgtttggcagcttcgtgtcgcccaccctccagcgaatatggcgccttgggggcaggtcgagacaccaagacatgcgaagacccgtcttgggatggcaactcgcgggcgtgtgggcgaagtaactccccgtcacataccgttatcggcttgagggtgtgtctctgtcagtgtccaccggagctacgggcagaacacggatatttccgcggctgtcttgtctcgtgcttgagagaatacgaggttgcaaagagacaaccacggggtgggatttcgtgacggccatgtatctgggaagagatccgtcctgtccgttacccaagaagcagagaagagccgtgccacagcatctctgttccatgtcagctccccaatctctcagcacctcaggtctgacttcctggatgcacaagcaggagggtggatggggcgccttgtcagcgcgcctcctcgctgcaaagcacacggcagctgtgcagatacttggcgtagaatggactgcctccgtctgcacggtcttccgaagtgggcagagcccaggctgtggggagtgggatggcatggttaccatgaggaaggggtagaagggtaccgcccttcacaggtaacagcaacgctaccccaacccaagtcgcccggcaggtatggaggctttgatccatccgccacagatgccacgatggcagttgataacccattcgagcaacaggctgagcagaagcgaccatgcatcgcagccaaccctcgctcgaagggctagacctgtgccgacctgcccacgtcccaaaggcagcccaggtgagccgaacaggtccggcgtagtgcggtggagcatggcgatgtgattccatacccgaatggggcgtcgcacctcaagcatccgcagaagagcggcagatcctacggcttccgactgccgaagagattcttcatggaacaagctgatgcttcttcttcggagacgtggtgccccattcccggtcagcgaaatgaaaggcctgtttcgccggttgaaacaaagccgggatcgattttgatgcaggctgccgtgtcagctctgacccgacaagcccgagctgtgtggttgcgcttgagttaggcgacgaagagggcagcagcgaaagcggaaggagattgctgatgacatccctcagccaagtgtcaccggctgcgatgataccaccctgcggacccacttccccgatctctcacccaaccccttggcaaccggcagtgcacgagccacatcgcggactcggagaggcccactgattgcctcaaggggaatggctcgtccacttttctccccgccagatccaacggctgttaactttgatgcgacgtctgttgacgataaccacccaagtcaccttccgcgtttaacaagatagccacctacgactccagcatctttttttgtctctatttcagagacttggtgaactcattctgtagctcttttcttcctcagcatcacgtgttgggcatcgttcgagaccggaaaatttcacgtataagaccgtcgggaacgacgctgtggacttggttcagtgacactctggtcgtagcagccgacgtctggtctgcaacgtcaccaacctcatggatggtagcgactgaaggagcctgcgattcctgactggtcccgccgtccgggccattatctacaacccgaaacggccagcttctcgtcgcctgctgcccttgctcatcagctcaacaaaagatggacagacaatggagatgatggatgcatgccaggcgcaggcgagtatccggcatctgctgtatcccgttttcgcatcccatcccatgctgacgccttctccgggcactcgtcttgtgcccctggacccatgacctggttgagccttctgcggttcagaagcaatctacacttcactcggctaaattagctgtgccttgttggatggaggcgacctgtccgccccctacagagaacccgacagcttcgcatctcttggccctctacgaactgctgctgccagctgcccgccgcatccaatctatgtatctctcggctttgggacgtgcccaccagagaggcccggggccggttccaagatggcatcaccatcaccggactgctagtaccgggtagatagcctggcagcgggagcagagaaagacgcaggctcagaacgctacattaccagtcaaacctctggtttcttccgctgaagccgtcgacagcccgcataggctcaatcctcgcagcgtcaccatcgagaacagccagcccaggctcggacgctgttagcgagatcaatagtccgtgaaaaatgagggcagaaaaagacgtcggccactcaaactttgtcgagccgttcaatagcgcgcgtctgtctgatgtgctgttgcgacggcatcagctttctgggcttcacggcagattggtcgcgaatctcggtccgcagttgagcatgctgagaggccgtaacatctccgggcttagccagttgagctctgggcattcaacaccaataactccagtcaagcccaggggtccggtgcaaccagcagggaccagcttcgcggctttggtgagcacgacttgaccagcgtgactgattttccaccgcccccgcaagcctgcctactcggtcgccactatcgcccgtcggtgggtctttttctcttttttttccctcctgcgtctccgtatctcgaaaacggggaggccgtcaggttggagcaggaccggaacacgatgccggcacagtgcagagacttgatctttgttcgcccgggaggagtggttctactgactcaggtgccgtgatgagattatgtcgttctcaaggttgcattccggccgggctgaaagaacgggtgggtgatatgtttggccatagctttttggctcgaagtaccagagacatatggcgactatcagactttctgccaggcccccactgcgtactggacctggcgagggggggagggggaaggggggggggggggccaaaccccaattttttttgtggtgaccaatttttcctcctacaaccacctgggcttgggccaagagggaatgcagccccctttatggttgtgattgagtcttggaggctcaggcatattctgatctggctctcctggcgagatttgcgttcaatctaatagtgatctctcgtagatgaaggagaagacattcacgaaagctgcttagtgtttaatcaaggggttaattgtcaggcacaaattaaaacgtgtgttttccgtctacctggttcactgtgtatggcccacggtgaagcgacttgctggcgggtaatggtgcctgattccccccgtgtcggacaagcagttgatctgggtggtggctttggcgttgatggagagaaccaaggccatgatattaacgttgatgaaagtaatgaagaagtaataattctagacaatgaatgtcgtcggacgttataccttttgtgctgtgctgtgtcgatgtttgggcatatacccgagattgcctcaccgaaagatgaagccggtgtagactggatagagttctatgcaggcgagcaatatcccacaaagagagctggagattgcgagcagctgcttgttttcatgttatagaagcctgtgtccctttcaacaagtaaaacttccttcccaggctttgaacgcccgctcatgcgtctgtcaacttccgaccacgaaccgaacccatcgacgacaggctccaccatcgaaagaaacacccgagcttcaacagcccagacattgacaaagccagacacacatccagggcaactgcaaagcacgagcgagttcaaatacaccatctcctactgaactcagaccccgtctcaaactttccctgcccctggtctcgagccagtttctaccattccaactcgtcttcacgtctccggcccgcggcacacgaagttcaagaacaaaaatagatcaaacaatacaccaagaccgagcgagtcccttcagtcgttgcctgacccatcatctacttccaggttctatccgtcccccctggcagtaacgctgctaaattcacgggctagcaaacgcaaaatcttctacccgaataactacaccagaaccgtaaaaccgtcccgaagccacgagccggctagacggagcagagcagaccagcacagcattaatccagcgcctgaccgccaacccaaacaagaaacccctcgactacgcaccgactcgaaaacctcgccccgaagctaccctccccaacacaacacacgatgctaggtagccttcactgctcagctacctgcctgtatcgcggagcttacctggataggcggaagacgagctggacagaacgcaatcgacatttgcttttgaggggaaggtggacacagtaagagtaggtgggtattttgtgtgtgtgatcaacgggggcaggcattctcaggtagggatgatacagaccagacgcacaatacaaagggcccggggggaacacggaacagaaagaaaaagaagaaaaaaaggccaagtgctgcgaaacacaaaagagcattctaaaagattatgaagaggctagctaaccaaggtgatgtgatgttcataggatgggaatctctaataaagtacagactttagctatttggtttgaatactgattgtccaagagaatcaagggaaaataaagatcgtattatgtgtgccttgtcctaagggtgaactgcctgtccccccattgccatgtccgtcaaactatcccccatctaagcacctctacatccagccattacgcactctaaacccgctctgctggcgggctttaccatacctgccttatatccctctctaaacactatccactgacgatttatacttagcggtagtaagaggcaattgcggccctnnnnnnnnnnnnnnnnnnnnnnnnnnnnnnnnnnnnnnnnnnnnnnnnnnnnnnnnnnnnnnnnnnnnnnnnnnnnnnnnnnnnnnnnnnnnnnnnnnnnnnnnnnnnnnnnnnnnnnnnnnnnnnnnnnnnnnnnnnnnnnnnnnnnnnaccgatccccatccgtgtcctgccgggccggggggcctttttaaacccccccttgatccctctgcccgttcccactccccccagcccttcccccaaagctattccccccacagttaatcatcgtaaactcactcgcagtcggcccatccagcacccccaactccccctcccccaaccacctaggcagcaccaccgccctaaccggaatcaacaaaatgataaaaaccggaaaccccaccgccgccaccgtctgcgtaatcgcaaacgtcgccgcaaacccaagcaattccaacccaacaaacaaccagatcttcttgtcaggacaccccctcaacggactgtccctcggcctgagcctcctctcctgaagcaaatacaccaacttcagcgtgatcccattcccctccagcgcctggaaccccataataaaaaacaaccccgccagaaccccctgcgggatgagatgcagcaccgacagaagcgggcccgtcatagcgacgagtgttatcagcccctgggcgaggttggagacgcgttgttccaccacgtgggttgctttcagttggggtttgccgccatgctcgaaagaggaagaggacgaggaagaggaagaggtgacgacttttgttacgcagagggactcggtgtgaaaaggggcttggggtatcagaccgttaggaaacggcaggcccaacagccccgagattcccgttgtgaggcctagcagaaagaggtcccagtggaagccggctggtttgcggagggggtactctgagccttgggctatgagggaggatactaggttactgtcagtggatggtgatgagggagagaagggagaggggaaaaaagggttaaataccattgtgatcaaaccaaaacaacaccgtcaacaaaaccgcaaacggaatcgccaaaaacacgtgccctatcggcaagtcccaaaagtgaacaaaccaccccctcgactccaccgtcggcataaacgctacacctgtcggaagcgtctccaaaggcacattcttcatcctgcccatgtaggcaaaccccgtaaaaaaaatcaccgtcaacggggtgccgtagtctttgataaacaccctaatccagtgcttgaacagcgtggattttgtgccaatctctccacatatataagcaatgcaaaagacaagcagcgacacaacaaccgacagccaaaacggcgagccgtcaccgagcgtctcgaggatttgaacgcccttttggagataaataagcgcgacgtagaagccaaagatgtcacagggaaagcgagtgacatagctaagcctgtttgttttcatcagctggatatcattataatccaaaaaaaaaaaaaaaaaaaaaataaaaaaataaaaaaaaagaaaaaaagaaagagaaaaaaaaggcggaggtgaagacataccaattacaagaattcgtcaccgccaaaacccaatgaaacaccaaactccacagtccaatccagcacatgaacccaaggtagtaagtcccggagtccttcatgatattatacaccgtactgccatcccacgttagccatccctctcccttccctatcaccaaccccaggtcatcagtgccccccctccgcccatcaccaccaacaacacagaaactaaagagagaactcactaattaaaaactgtaatcggccccgtaacccccacaatcacaatcggctggcacgctcccacactaaacaccaccgcccccagcacactagccaacagcgtctcgttcactccgtactccccgttcgtcttgtgcagcatgtccagactgaacgccaacgcgggcaggatgttggcaaaaaacatgtacaccgtcgccggcacgacacggtaatcccaggcgtcggtccagtcggaccagtagtagggcaggcggcgtttgatgtcgaggtacatgcctcggccgaggtggattctgtgccatggttcttctggtttgccgtgtgatggtgatgatggggcgggggggtgaggtaatgagacggcggcggcggtgtgagttgggaggagctgttcacccccccccccccccccgccgcggccgcctcttcttcgggtggtaatgggggtttctctgatggcattttatggtttgtggctttcacttcgnnnnnnnnnnnnnnnnnnnnnnnnnnnnnnnnnnnnnnnnnnnnnnnnnnnnnnnnnnnnnnnnnnnnnnnnnnnnnnnnnnnnnnnnnnnnnnnnnnnnnnnnnnnnnnnnnnnnnnnnnnnnnnnnnnnnnnnnnnnnnnnnnnnnnnagaccgctgactgagatgagatgaaaactatttccagactgagcctctctcaatccagagagcaaaatcctcttcaattcctgtgagttattgacgcagcgcaattgatgccctgagcgtatcatccatcaacaacgtcagaaattgatgaaatagaacaccccgagcaaaagctgcgttcggcaccgtggcggcgactttccccccaaaaaacgacgtcgctaatgagcaaagccaactaaaaaagagaaaaaaaagaagccgagaaaccggccccacaaacccgctaatccccggttttgtctccccccccccgactaacaacgtctgatgccacccttcattgttctttcatgtttttccccaagtccctgaaaatcatcgccgtcaaagacctcattcataatgtaaccgtacagattcaaagcctcaacagcaacgtaatcttagtagaggaatggtatctcaaaaacctataccacaattctcccacttacaccaccaacctccaccacaccacacaccatcaatctatcataatacttttacatttcatatacaaaggaaaaaagagtttatagtagtacatagatacatgccgctttctcccccttcccctccactcccctcctcctccccacctccatatcaatcccaaacaatgcacctaaaaagcatcattcgacctgattttaccacttaaacccaccccatgatgctgtcctttttctttcttcccagagtataataacgtaaccacatgaaaagaacacacacgagttgagtttttgtaaaaatctacctcatcacacaccgaccttcattcacctcttctcctctccatcctcatgctccttcatagcaggctccggacccccaggtgtatccgtgctctcggtgggaaaaggcggtgcggccgtccccttgcccccctttccgtcaaagtacttggaaaactcctccttctccggccactccctcggtcccagcagcctgaccaggtcatctctgctcagcacctccttcttcagcagctcctcggccacaatcccaacctccttcttcctcgccgtcagcaggtccttgcactgcttgtacgcctcgtccacgattctccggacctcggcgtcaatcatctgggcggtcgactcggcaaacggcttcttgagctggttctcgtcgttgttgaagtggagcggtccgagcttcttggacatgccccattgggtgaccatggtggtggccatgtgggtgaccttcttgaagtcgtcagaagcaccggtggtgacggtggggaagtgaagctcctcagagacgcgaccgccgagggtcatggccatgcggtccatgagctggttggtcgacatgaggtaagcgtcggtggcggggaggtactgggcgtaaccgagagcaccctggccacgggggatgatggacaccttgaggagagggtcagcccaccggaagtaccagccgcaaacagcgtgaccagcttcgtgataggcaactgtcctcttctcttcggggtcgaggacgagagacttgcgctcgagaccaccaatgacacgctcgatggcctgctcgaagtggatcatggcaacactggaagcgttggcacgagcagctatgagaatagtcagcactagactttacgatgaaacgaaaaagtgagaaaaaacataccaataagagcagcctcgttgaccgcattggcaatgtcagctccggcaaacccaggagtcaacgcggccaaccgaccagtcaagtaggtcaaatcctcattcgtcagaatcttcttaagatgcaccttgaaaatctcctgacgacccttcatcgtcggccgatcaatgtggatatgtctgtcaaaacggccaggacgcatcagagccttgtcgagaatgtcaggtctgttcgtgccggccaacacaacaacctgctccgaggtgttgaagccgtccatctcggtcaagatctggttcagcgtcgactcccgttcgtcgttgccaccgcccctgaagccgccgccttccgaacgggactttccaaccgcatcaatctcatcgataaagacgatgcagggagcgttctttctcgcggtcgaaaacagatcccgaaccctcgaggcaccaacaccgacaaacatctcgacgaactcggagccactgacagaataaaacggcacctgagattcgccagcccgtggctttggccaaaagcgtcttggccagtaccgggcgggaccagacaagatcgcacccctcgggatcttggcacccagcctctggaaccgctccggcgacttcaagaagctcacaaactccataatctccgtcttggcctcatccatacccgccacatccgcaaacttgaccttgacagccgcatcatggttgaactccttggccttgctcttgccgaaaccaaagacgccgctgccaccaccacccataccagcaccggcccgtctcgccgaccagatcaacagacccatgatcatcaacgtcggcccaaaagcaatcaacaagttgctaaagttgctctcagaggcatacgagaccggtatcctgtccgaggtcgggatccccagttcctgctgcgcctcgtccagtctcctctcaaaggcatcaatagagccaatggtgaagtagtaatggaacccaggcttgccagcagtagacccagggtaaacagagttgaccgcctccctatccagctcaaccttgacccggtcgtgatcaacaatcagcttcttgaccaagcccttgtccaaaaacgtcctccgcagctcctgccaggtgatctccctagagttatccccacccataaacagcgacagcaggggatacagcaaaatagcacccaccacccagctcatggtgtccgacagctggaatcccggtctaggcggtggcgtccccctcttcctttgctgtcccttctgcttcccctccccatcctgcttcccctccccatcctgcttctccccctcctccttctccccaggcttcctactctcaaaactcaccctcctcgcctccctctccgccctcttcctcctctcctcctcgacctcctcctgctgcgcctgaaactcctgaatatcctccagcatcttcggaaagtacctcatcgccctcaacgcatccatcatccccagcttagggaaatcccccgtccagttcttgaccataatgtcatgaaactcctttggcaaacccggcactttgttcacgtcgaagatcgccctcagctccggcggcatctgtatcacacccaggagcttctccaccttcttcagctcctcctctgacaggcggacccagccgcggggtattggcttctcttcttcggttcctggtggtgtcgtgacgtctcggtggtggtcattgttgttgttttcgggtggcccggcaggaggagggggggggttggtcgattggaatcttctcgagagaacaaaaactgaaccggctggggaggacgaaataatccgggggtgtcgagctgctcgaatagctgggcttgtgatcgctcggaggggtagactcctccttgcgccgccgctgccgccgccgccgagagcagccagtcggcaggctggggatcggaacattgcttttgttgtgtcttatgtccccttgtctaaatcaattcgacctccttttccccttcgttgtaaaagctgcgtccggttttgttgtggcgtacaaccacaagaacgcaggcgagaaagatggtgggatgtggtgatgcgatgcgggattgcgaaaggaccgaccaccagcagcaggtgtggtggatttcttggcaacccgaaccagcaagcagcagtttaaaacaaaccgtgaccttttctatcagcttgataagcagcggcccaccgcctgcgctctcaccactaaccactagcggcaacttgtaggaaaaactcgttgaaattgcctacaggaagcgggcagtctttttgaacaagcccaactttctgttgttgtggttcaagtgagccgcagtgttgacagcaaaaagggtttcctccctgtacgaaagctctgcaaaatcccattcgatgaatgatgctgtgcggcgagaaacacctacctaaagctcatccgaccttatcccgaaatgtcctagcgccgagtcacgtggggagggggaggggctacaaagctatggaattatcggactcctggcctaaagcctatacaaaatacagaagctccatagcccccaaaagtgcccggacaggctcctcctccgtaggcagtgtggtgctgacgtatggagtccacaagaaggcaggtgagcatgcttagcttggtcacaacgaccatgacgagctttagcttgaagctcaagatcctgatgctactgcagatacctttaaataaccaatccattcatctgatgtttagcagcaaaacaagacagaagatgcacctgagcagagacgtccttctgattcaagcccctatataccctcccatattcctcacccatagcaagttacacattcccatgcaaccacccaacacaacaatgcttcccaaagaaaatcatcaactgaactaaacaaaagggggaatccgttcaaaacaacaacaacaacaacaacaagaaaacaaaatcccaaaaaaccccaatgccaatccatcacgcccacccatgaatttccattcccatatcattccatccacccttttccctttccaaagatgcccaatcctctttttacctttccacagcccccccccccgtttcccacctctacatcctcccagacacctcccccccaaaattcccattctccacactaggatacgcccccccgctcatctcggcccaatcccaatccaacgtcatcggcaagctaaacaagtcctgcggcaacataggctgctgaaagaaccctccccccagcggcgggctcgtcagtccccctgtccctcccatcgtaactgaattcatcggatcaaatcctcccatatcataccccccgtaatcaccaccaccacccggaacaccgcctccaccattcggaggcgcagctgcaaaatccccatgccaccccgttggcgccataccaggcgacgaactcgagctcattgtcccttggccgttggcggcgccgtttatcgggccgaatccagtgtttggtggtgagcggtggtcgtttggtggtgaggaaaggttgttgttcgggggctgatgctggttgttcatggaatgggatgcttgtggtgtggcagagccggctgttgtcggccggggtgtaggggcggcggctgctgggttggggttgaaggatggggagtccccggtagcagttgttttggcagctggttgctcggtattcttcctcttccgcctgttggcgtgttccttctccgccttttccaccaccacctttgcaatccgctcaaactctgaacaaactcccagcatacggtggacaccacctgtctcggcttctacgccgagcatagacaagaagttgaccaccacgttcataagctttgcgtctgaccgggctcttgggtccagtggattttgcaacacgttgccgaagagggtaacgagggctgatactgggaagtagaggaccatcctacataataattagcaattacgcagccgagaatcggacgggagcaacttaccaaacacaagagaaatccccctgagggatgtacttgagcagagaaatcgacgccctagcagccgaagtgcacaacgccgccgatgagaaaatgcgagggttcaatggcctagcattaagcccctgaatagcatagttggacaacctgctggtccaatacccatgatgaatcgacatccggtgaattgtcgtcaagcagttgtaatagttaaagtgcagcatgacgatgtgcagaatcagcggcgtgtgcgatgctttgatttcgtgttccggtcggaagtcgatgggaatcctgtccttccagtcctcaagctcctggtcgagttcgccaatggtgttcaagagctcgccatcagactgctttgtcgcctctgtcgagtacaacctgttgtaaaccctgctctcaacaatggatagctcgcacataaccctaaacaggttcatcttcccctttccgtccgccagcggaatgtttccgatgccatccgccgggtcagcgtcaggcagctcgacgttcatgtcgctatcatcctgtgccggtggtcttcctgatcggaggcaaagatccttgtccagcatgtaggcaatccaaaacactctcttgcgctgctcgatttcgatcgggttcaaattgaagttggtgcccttcttgtgaaggccgatggtgtgcgccagtcggatggcagtcgcaatgataagtgacgatggctgcgggttaggagtgccttgcataaacatagccatacccagcagagcctgcacactaagcagatccgtgcagcgcatcacaatctccgaaaagcaagccatggcgttcttcatgtatgcccaagccttgtcgtcctcttcctgtggtacaaggttgctcatcacccgcagccgatgagcgatagccagagccacgttcaaactcgcccaccatccagatccagtatatgggtcgctggaatattgtcgctctaccagatgcataaacgtcggttggtggaagagcgggaacatgcagttgaagttctcgaaatagtccttgagcagcgaaagggcctcgttctttggtggcaggtcacggaagatgactcggcggaagaggtcaccaaacacatcaggcttccatgcagtccacttgtggtcgtcgatcgagacatcagagatcatctgctggaacgaagaatcgcccatcttctcattcacccactggatacccttgggtgagaagatggagaaaccggacgaggagcctttcccgtgtcagtaacaagtggcaagctgatcatagaccaaagacttaccaatatatctcgtctcaccaatgttattggtgaccagcgagcacatcatctcactcagctcagcaacctcctcctgctcctctccctctccatccttttctggcgtgatagacttactcttatccttactatcctttgctggctccggcgaagccaaggagctctgaggagtggagacattgccatcatgccccgacgtggcctgtgatggcgacgttggattcgacgcagcctgagaagcctgtctcgaccgctgctgcttctccgcaagcttcttctccaacgtccccagatcggtagcgccattgtcatcttccccaagcagacctgcgccaagaccgttagtggaccacgccctcaagttaagctgctatttaaggaagccatggttggggaaaagctatgcgtacctgacagcctcaacaggtgttccatacgacctaatctgttctcgagaccttcgatgtatttggccctgtggtcgatttgtcagctcaatggttcaacagcaaacccgagcttgtcctaaatacgcaccccttgggcggattcctcttcttttccacctgtgtgaagacgcagtcggtcttgtagttgatgcagtgtgtgcatgctggtaactttccgtcgcatttgatcttcttcttcctgcacatatcgcatgcctgcagattgcccagcgggtcagcaaaacgccacatcccgtcgtcgagaccaagtattgcttcaactcacccttgcgatcctcctcctctttgcttcgtttgtgtcttcaagtagcccatggtctccaaacatttgcgcagccataaggtcgggtggtagttgcggcataggcatgccatgttcagcatagccgccaaagatctggggtggtggattcataagcggtggtggttgtatgggcatctgaaagcccccgtgcatgtggtccattgtgaatagttttatcgcctaaccggcgttcgttcgtcgcaaactcgatatcaaaatggcaaaagcgcaatgtgaggtagcgagaagctatgtcagatcggtcgaaaccgttgcgagcaccaatcgataatatagatattaggcggggccgagcgggacgatgaagtgtggagggggcggtaggagggtgtgtcgagtatcactatcgtaggcgccgggcagaaaaagggttgctattattaccgtccactctttagcctttctttgcgggctgtcgtcgaatcaggggaaaagtgtgccggatggtccgggtataggggggctgagctgctgctggatacaattcgactgctatgccgacaaaagacatccgaatatcacctcagcacttcttcggtcgcggggtcattcgtgtgggttcgacagcttcggttgtgacacagcacaaagctcgggtcagtggaggttcaggtccctccaagaatctgtagccagctcgctgggatccaatgtcttggagcgggaggagtcgcacgaaggcaagccacgccgcggattgaagcagaggctgtcgggaaaccggggaagcgacggcaggatatcgatgtggaattgcaactgcgattcttcgttatagtcgtcgtcgaccaagccgacggtgtgagagtggattgactgttcgttatatacagtcgaaaagattcgaaaccagcaaaagggaggcaagacagtcacgaagaaagaagagctgcggcaaagtgcccatattaaggtgtgtcgggtgtcagggccccagttcagtgtgtccccagcgggctgcgttagcgggggacgcgcgcgagcgatcaccaagacctgacgacgttaggcaggacaggcatgtggcatgtgggggctggggttgggtgactgagcgcacgggctggcggccgaaattcagggtgttctgcttcactgttccacctcaggtcagagggctgctgctgctgcttggtaagcttcacctccacaatcaagccgatgacgacgccgaccgttttcccctcggggtttattgatcttacaaagtccgctctcttcagttcgaatcgtccagatgggggcatatgaagcggcacagagggcccggggggaatattcccccatccccagacatcatctacacgcactgcccactatgccgagcccgttctctgttgtcaaactgcaggagtacgacctaccccagaccggatccgaacattgaaagctcaacactttaggtggcattcaccgcaccccagacccgtagtccggcgtttggaagtgggttgagggctaacactatagctagctaccttttagggggtggagggcgggcgttatcaaaggtggtatcttgcagtacctatcagagacatcaactcttcagtcaggtatctatcaaacaaggtgccttgcccatcacgatcacccgtctcaaggcctccaaaatggactgatgatattgaccagcaagtatgatggcggttacgcaaaactcacaaaattccaggcattgcagaacttttcccatgatgatgatgatgttcagggactcaatatcatgccatgcctcaccgagagcttctgggctcttctccaaggtttccactgtcctcgagacccgtggttgtcgaggtcgatcataaactgcgaatcccgtcagagggcggcctcttctggaatctggattcgagctcagtcggttcttttgcgggcaaggggttcccagaagccgccggttgtgagacagtgatgaaacgagcatgtgttgccgtggaggggtcgtcgaccagaaaccccgccgcttggacgttgatgtcaccatggtcagtcatgacaaatccaacggctttctaaactcttaaaattctttttgatttatttcttcagagtcgttgctggagactggtcgtcggttttgccaagcaccctatacgtggaactttcaacgtcgtcccatctcggaagcaccagagataagacgaggcttaacgcttacagtggatgacacaaccacttcgcatagatggtctcggatcagaactgtttcctagctcgagtagtcaagtgatatctgagtggccaggaagatagctgcaggcctgatcaagctgatcggcaacacaaaggggttttgtggtcacccttgaatgcgccaccagtgtctttgaaggctatccgatcatagccttagtggtcgaggctcagctaggctgtgtcttggatttgagttcccaaaatggcaactttataccatgtaatataacgtccatctcttcttagcaacgtcggtgtcaagtaaagaggtatagctccaagatctatgtcttcacggtggccggcaggcgtgcaaagactgaccaaaagcctgagcttcgagccccagtctttgctcgtatatattgcacacaacaacatgaacaaggttcaacgcccacatggtattcaacatgtctaatatacagcccgtggcatggcatttaaacacacccaatacacacttatagtacaattccaccccattttcattctctccccccctaatacttgagccccttgatcctcttggagtacttccacaagctcttgtacttgggcttctgcctcttcgcctcccaacccctcgccttcctaggcggcttgagcgagtgcacccgcggctgcttaaactcaacatccgcccccggaataccatgcctcgccatcacctcagccgtatgctcatcccacacgctcctgaaaagcgtgaacccgaccggattaagatcaaacttgtccctgaacgacttgagcgagaacccttctctcccaccgtacatctccttgagcttggcaagatcaagaggctggttgttgttgtgctcaagaacaaacacgctcaggcggtgataaggtgagcccttttgggcagtggggggcagccaagggatggcgagggtgccgtcttcggggaggccgccctggggggattcagagctggctttggagttgagacggtggaggttgagggaagtcgaagtgggacaccagggaatgttggtgaccatgaagtgcagccggcggccgtacgagtccgtctccgggttgggaacgtccgagtccattaccacgacggagaggagacgctcgccagagttgaagacttgcatgcggaggttgggggggctttcggtgatgagcgagtcgaggatggttccggggggtgctttgtagccgcggaaggtcatcttgacgtccatggttgggtcgaacttggggaggatgtcggggacaatgttgaactggtggatacgctgggtgatgatcttgtagtccatggagcgccacttgttttcggcaaggtagcggtagatgggcttgttcatgtcacctgggtgcatgttagtgaaagctggcggcagtttacaaaggacatcaacgcaccgtgcccgtcctcgaaccgcctcttgaccatggggtcgttgatatcggcctgaatcttgagctcctcgacatgtttcctcaaactctccaaccgcttctgcttaaacacctcgcctcctctgtaagtgctggcgtctgtctgctctatccgcttgattctcgccaactctgccttgatcttggcgattttctcctccctgtccttggccaaaaccttgcgggcctcctggaagcactggtatggcagctgctcgaaaggaatgtcgcctgtggtagcaatagcagctctccttctcctagaaccaagttctggtgacagcagcttggccagctcctcctctgatccctgcttgattgctgtgatctctgaggccttcttctggacaagaacggcagcatcagcggcgagcttctgcgcatcagatcctgcgggggttgtcgtcgtgggctcatcgctgcgactgggggtcgacgaaaattggcgaatagcggcgacgattggcctggactgacatgttgccgtggtgctggtagcttgcctgagagaccgcacaaggggccgggcaacctgctgagtccccgacatgatttctgaatattttggagctgtcttgggctcccaattccacctatgccctgagctgttgaggatctggtcggcctttcgcttgtctcttgagccggcgccgatagagaaaattcgtggacccatgcacggcggttcatccagtcagcttctcgcacgcccaggggtccagtaaacgtccggcctggcaagcgtctgtgcgccaacgactccagatcttttttcagagcttcaagagcagcagccagcgacagccaagatattcgcgaattgcccgacagagcggatataaggtcattcttgggagggacgatagcgggcgccttcactcggcctttttctacaacccgccgcttttctggtcgagcaccgattgccgacgacagaccccccgcaatggccggcaaggggatgaggtgcctcagcgaggcgatgaggggcttgagcctcggtgcgcaaacatgcagaacagtcccagtgtgtattttctgtccggccttggttctgggttagatttggacagtcttgctgatatgctgtgcccatgaccaggtccgcacagctccgttaatatcaaggcggtccatggccaccgaggcgcccgtttccaaaatcacacgatcagtagctgagaaatggactcccagtatgcgatagcctcactcggtctacgaatgaccatacaacagtgatcttcttgctaacagagcaatagtcaccactgtccctgttaccgtccactccttccccgaccttgccccccgctccctcgaaacatactcagccaagcacctctacctccccctccgccgcgacattcttcaccttgcggtcgtctacgaaggtgacaacacacgacagggtacggcccaagccaagactcgctgggaggtcgccggttcccacagaaaggttcgcccacaaaagggctcgggcagagctcgtgttggcaacaagcaatcaccgctacagcgcggtggtggtaaatcccacggtccccgaaaccgcgatttcggcaccaagctcaaccgcaaggtctacgatctggcctggcgcacagctctttcttaccggtatcgccgtggcgagctcatcgttaccgaggacgggctcgatctccctctccctgaggacttcctccagcaagcccaggacggcctcttgacccgcgagcttgaggatgcctttattgaaaagtacgttggcgagatgctcggagcgatgcagtggggcaaggctcatggcaggacgacattcatcacgggggaggagcggatgaacctgttcaccgcgatgggggtggcaggtgagaacggcagggctttggagctggaggatgtggatgtcaaggatttgcttgagacgggcaggattgtcgtggagagctcggtcctgaaggagatgatcaagcggcataggagtgatctggtgacgagcattttcctgcctggccagaagaacaccaaggagacaacaatgggcactgttgtttacccgtctagcaaggtttcatatacctagttcagagttgatggaggccctggtttgtattatacactaaaagaaacactgctgaattaggggcagttgttgtatgtaaattgttactattttggaagccatgtactatttggtttgccgtttgtgcttcttttgggctcctgcttgtataacctcagatagacgctgcagagggtgctcaaggactttgtagcactgtcagatgactcctgccatgaggattgctgccagtgcccaacaactgccttgtgtgggtggtgagtgcgtgttgcaagccacaatcaatgtcatcgccgatttacacagtgccagctgtggagcagcagtcaggagcaggcagaacgccccgctttttcatgtgcgaatttgcaggcgtgcacagaccaatccccttgtgtatataatttcgcccgccctcccgtcaacttcctctccttcttctttttttttctccatccaagtgcaggggttttacgcgtatcagtgaggattcgtccgagatcgcgtttttgctagttgaaaactacatacctgaccgctcttgttgggactcgttcctggcagggaatttttggaattaccaacttcttcagctttggagagaaattctggtcttgtttttcattgccaacgcttgcttggttcgagcgtggcaaggaagagcggcgattggattgtgggacggggattacaacgaatcgaacacgacttgtctaacagcgactttttgattttggcgctgcgatgggagggtcgtcttttttgggttgaccagtctgtgatggtcacgactttgatgagaggggctgtgcttggacaacttcgaaacattggtctctgacgcggtcgcccgggcggtcactgagtcgagagggaagagtcgcacgacgtgtcagagttgggccggctcgtgatgcaacagtgcttttgagttttgagcgtgttcaacaaagtttgatatgggtggtggagttgtggattgctggcgtttgataatatcgaaatttggccccgccatgagttgtcgctcgtgggctggttatcatcacccgccagcactgctctccagatttgtcagcccatctcacgcactgtgtaaccccccatattcgtgactctctctattccaacaaccctgctgtaaatcatcgagaatagtagtgataatgagcatcttgacaatgacatgaatgggatatagccaaatgacgtcgtgctacatgctgaggatatgcaacggcgatcgcttcagcccagcggtctggacagtgaggtttgaggttcgtaggtttgcggcacatcagcccgatttcttcagggcggtccaggggggccgccgcttgttgcctgggtgggtggtgtgcaggacaacgtccgatggaccaaccgatcaacagaaacgccggctccttggtgtgactctttatcaatcacacggaattctcggagtcagagagagaactgaatagcgtcttagaatgatatgataactgaatggataatggcaatggtatctcctcaatttatcgaagatggaaattgataatggacatccggcgggcagcgggccgtcgagatcaaatcgccaaaaggctggatgcaaagcaggcacccgattggctggcgcgcgagggttgcgcgaccagttcagggagagtgggttcgtgtgggttagagtggggcgtgtggcagaaagagacttccgcactgtccagttctgggagcggccaagtgaccgaacggcttctaccaaggaaggcgagcaccgcagcacctcctctcctccatcatcatccatcaaacctcacaaccgcccatcgcccaaccgcctcattcaatcgcccagagccccagaagaggcccgcgaccgccgaaaaccaccgattcccgtcatagagaacggtctgaaagcattcaccgccccgaaatccgatttttcgagtccgccgctgcagcaggaggagtgcatgttgctggattgaggttctgcgaagccgtcgtcggcgctttcgcgcgactcgcccacaacaacctcctcccccgccccaggcccttcccgcatcgcatctccgacttttccatcgagcgaagcggtctatcatccccaggccgccatcttctttgcgaatccgataccgaccgcttgtttgtggttcaattttttttctttgtccgtgtcgccactccgctcgggtgacggtcgcgccaaggattttctctcggtcacccttaccgtcccgaccacatcgcatcatctcgccattgtcggtcggtccatcatgtccttccaccctcagactccgcaaagcccctcgcaattctctcctggcacgagcgaccagaatatgagcatgagcagctccatgacctccatcacgaccgctctgccgactcctgcccacagcgtaaacggaagcacactacctaccgacgcctcccaggacgtcgtcatgggcggagactccccccacaagcgcaagcgagcctttgacgatctcggtgatagacagcagaagaaggtgcacagcgagggccgcaaacttggtattgatgacctgcaccttgatgtgggcgagaaatacctcctttgcagaactcgtaaggctcccttgaaactcagtgatgaatgcggtggtttcttggtgactactgctttttgttcaaagacttggttaacacgtgctctttctagcccatcctacgccgcgcccgcatgtgtcggaagatctctttgagctctacggcttgggacctcttgccgactcggtagcccgcgtgcttccgaacggtgagaagaatgcgatcaggaagacgtacaagggtttcatcaagaagctcggcgttcaaggccacttcgactcggtcaagcaagatccccaccgcgaggatagcatgctctggttgatgcaggtgcccgaggatgtttgggatgcaagatacgtcaggggcaaggatattcaccacggattcaaccccgaggtcaagagcaagctggtgcgtgctacgactatgagcaagggtgtcgttcccaagagtgtctgggacagctcggtcttgggcgagattggccccggcaagggcgacagagccatgtcttctgccagacctaccgcacccaacaccccgctcaaccttggagggtctcaacagcctcgtatcaaggttggcactccggtcgctgcccaggatagggccaagcgtgccgtcaagaagagaagctacggtgacagcagcttcgaaggctacggcgaaggctttccagacgatgacacaggcgctgcgtcaggctactctactggagagggtgatatggcgtctgggaacaagcgcagaaaaaaggtgcttcttcatggctgatctcgagcatcggggacatcttttactgacacgtgaacagacccatggagtctcacaggcccatcctcaagcccggcaaccggtctatggcgctggaacttaggagtctccagctgctgagtccagccagccgccgcccgagcgtgtcaccaagtcgcagactgctaccaaaaagcaaactgcaaacggtggtgccaaagcacagggacgaggacgccggccacgtgccgattagaaaagccacacctaccagtgttcagggtgatacctggtgtaccggttgacgatgaccttggctcgcccgcgacgcatcatacaatgttttgccttgtcttgcctctttgcgcggagagttgacaaccgagacgaaaagacggtcacagcttttggagccttttctttgcaacgaatgtggtcggcagcaacagcgattggtatcgacccgcgaacttgagacgctagctgcatagttgatgagtacggcatcgatttgatcaaaacatacccatcaacttgaatttccggtatccgtcagtctatacggccttgtctcaatcgcaatcaaccgatcctttcgcgtttgttggatggctttcgttgtcgagcagagggcattggctttgtgggttcaccacaatcgtgggctaacatcgagggcatcatcgggggacacaagaaacactgatattttgcattttgcaaatttgatttttcagcaaggcgttggggtttaaggttctgtctttttattttacatttaatttgatattccccgggggagggaacaacacaaaacaacaaacaaacaagctttataccttttgggggaccagggttacttgaggcatttcaacgttcttgacatttggcgaggtggggacgggggaaacgttcacaaagatcataccaaggacatgagaaacatgatgagagggcacattggggggtttgattattctgacgcgcgcgaggttctgtattcttgtttttctttgctgaggggcagcaggacaggggacctacatggaccaacggaggaccgaggccgggatcataaggaaacgggtttatgaaaagggggtttagagagggttgaccggctggcttcttctttttttatgagaggagttttgatatcgcaaggggtggtgggtgagtttcctggtctatatggtctgtggttttggggttggtgaggttgctgcttttgtcttccggggggaggcaagatgatgtggtggggagtagggagagatggtggtggggttaggtgatgatggggtgtgagaaggagggagtggaaaagcgataataaagcagcgtttgctatcttattcctgtgtgccgtgatgtgattgtgatgtgcgttgttcctccctccagatgggctgttcagtttgatgaacctttttgttgcaaccaggtattgtctagggagccacatttggtgcaattggatgggtggtcttacgaatgtccgtcaggatgtcccctttttccttctgcggctgcagttgataggtagtttgtagttgataggtagtccttggtgatgacggttgtggtctacccagttgcatgcgcgtcgggagagatatttatatttcctgctggccaggccggtggtgattcacactatccgagtcatcagttgttgagcgataggcgtttacgccatctgctcgtgttcttaccgagtaccagttgagcacaactcagacgaccatggttttagtcacgccttcattcagccacaccaaaggttaccacaacccatgtctagggtcgggagccaacaagtcccggttttgggggggggagggcgtagtcttgcaggtaagattaccgagaggttgttgcgtagatgtaaggttgtggcgtggtgtctttgccgcaggggttgggatgatgggggagatttgatatcaatcttcaaatccgactttgtgtttctggtcaagtagcaattctgttgcattgacgaaagctccacaaccaccaggtcaatataccaagccacatcacgaaaaaaccaaagcctcggggtgtagtactgcctaacaattgatatcccccccaaagacagacacaccttgatgccatcactcgttctctgtcttttgtacgtaccaaccaaagattacacattacaacaaaatctaatccaaatcctcgccctcctcccccaaaacaaccctcctcgtcccatcctccctcacccaaccagccaccatctcccccacatcccccaccagcagctcataatgcggcgccgtgtcaaaaaacagtccacaatgagcccccacctcgtccacatcccgcatgtagacctgaacccagcacttgtcgtcccgttccctaggcaaaagacagaatttcccgagccgtttcttcccacctgcttcttcatcatcttcttcttgttgatccaaagaggaggttttgtggagtttattcctctgctgacggtcctgctccttttggcgtagtctctcttccttttctcggactttcgcctcggctttggcttgcttttccgcctctttggctttttgggctcggagcttttcttcttctttggctttttgagcaatggccttctcccgggcttttatggctctggaccgggatttgaccgcttcttcgtatgtctttttggtctgcttgtaagccttttctgcttgtttgcgggtttctttgtcggggagggaatcaagatccgggggggtaggtggggttggttcatctgggatgggggggagggtgtcatcttctggtggaggtggtggtggctgggttggttctggtggtgtcggggaggaagattcctctttttgcggttcttcctccaggggttcttcttcaggtattggtgttgggtccaagacctgaagaatctctgcagctctgcctgcctcgctgtggtcttctattgaaatcctgggggtggacacccctgattgtatcggtgacgaggttgacggtctgagaaggccattgtcgggggtgccgggttttcgtggcttctttgggatgccggtggagacggtgtagtagtttacgaatctgactctggggccgagttcggggtgggctatgtcgtcaatgtcttctagttgacggagtcttttgtacctggtctttaggccgttccaatcggcgaggcagccgccgaattcaagatgagagacgatgtggctggctgctgcttcaaagaggttctcttgcttgtgtttttgggcaaagtgggctatgttcttgatccagccgcgatcgatgaaggcgacgtcgttgaagaaggttgggttgtaggttgggtccggttctgtggctgcaggtggagatgggaagtgatattgtccgagtgtaggggaaggtgcccctgagggaggccggatttgctcgtagattgaggcatcgggagatagacgacctgatggtgatggtgcaatatccctgggtatcactgagtctgaagatgtcctatctagtgctgtagggggtggaggtgagggcctgaagagactggcgatgccggatacaacgataccagggtgaaggccaagtaagggagcgtcgagagaaatgctccctaggatccggtgacggaaaggaggtcctccgcttggtggtgcgtcatgtcttggctaatgggggttgatgttagctcaagaccttgcctcagtggaacatattcacaacagcggccgcccccaatacagaccgccgtggctgcttattttgttatagacaaacttaccaacaagacaatatcggcagccagaagccctcccatggaatgccctaccaataccacgtcggtggtgggcgattcatgaggcatcagccacttgctgaagttctcgcaggccacctcgatagacttgtatgtcttgtaccgggggtagatcttggtgtgaatgacatgagtctcggccagtgcctccttgagaaaagcatgcacgtgtgcgggaaacgagcggaatgacgaatcgttgcccatgaagccgtggatgtagatgaccagcaacttgcgcctttctatagcctattgtcaatactcaactcggaaccccgccgtcgaggacaccaatgactgtgtcgaagacatgcggggatcgcggaccagacccggaccagatgaccatgttggcaacctgtagggatcagacgcacctggcagctggagggttgagtgcacagacggtggtggtgataggttcgagcttgtggttgatggcatgacgtcagaaacgctagactagttgaatttgacgatatgttaagatctgataaactacacaaaatctcgggtaagacagaacaggatgtctctgttcaacgacagcaaaaacgtggctctacaaacatgccaaaatgaggctgtgttcctgactggagcttcaaaagatgtatgtggtggtggttgggtggcaggtggagtgcagtgcagtgcagtgtgagtgcccaagaggtgaagttgaaagcagagcagttggagctaacgcaggttacccaaagccccctcttcttcgtccgatgttgcgctacgctgcgtatcttccggtacccgtgattcctccgagtcggctcggattgccctaccctaccgtgcctacccaatatcgaaggggagggcagggaagggtagggaacggaggtttattttgaaacgatcgatggagccaacgagtgtcaactatggagtcgtggaagcgccgatatctgttcatgatacagagtatcggagacagttctcgtcccctatggtcaccgccgacacgtgagacatggcaggccctgttcccgtttggtgtaacgtcttgacttggccgttccccaaatgaagctcgtgttcttctggtgtcgataggcagagggcaattctggccccaagaatgcatatcgaaagagtgggccaatgagggggtggacacgcgcaatcccgcagcagagccatctgtgattggccaatgggcgtcgggggtgttgaagaagagccaaccctctgtgggaagcgagattgcagaacaggctcaggcttgatgcccaccgccagccctgggctgtttcttcaacggccagcagcaatttaaattactgactggaggatcctatatccacgtcggcgcccttgcttggtgtttcttgccctttccgatctctctctttttctttttttcttctttttttccccccctctttgcagtccagtacagtcccaggagcaccagatcccgccccaaacacaggacagcgacacacccaacacaacgcagcgcggaagccccccatggaggagattgccaggagaggacaacgatcctaagaaaaggtgtcgacacaaactcacgatggaatgatagcgaccatgactatgccaagtcaactgcaccgaatcacgcagcaccacatccattacgagctgcggcaatccaacgcagcaccgccaacccatcgaatacgggattcctcctgctagggccctgccaggcgaacaccaatacgggtcccgtaccgactaccgatcaccgagacacgcccaacactcctttttgggcaacgaatagctgccgtcactcgttttttcccacttttttcccagttgcgctgcctacgcaagcgccatgactaaccacaaccaagccgctggtggccccgggtcttcactctttcaggcccgccgcacccgccacgatcacgctcacagcaaccactctcccatcctcctcaaccatcacaaccagcaccgacacctgcaccgggagttctctcaatcgctcgagaacccccaacaaccacaaccgaaccaccacgctcgttccccctccgatgcgaaactgcagccgcgccaggtcgttgtcgtccaaactgtttctgtcgtccaatacgttgatgctacaggcgcactcgttagcctttcgacccttcgctcggatcccgtcgcaccgtcgcccatagacaccctcccggcagccgtcactgctggcctcaccacgccgcgacgacctattgcccagcgtgtctctccccgacccgacgctcgatcccagccaggatggcacgccgacgcccacgcctccagccgtgaccgagcccgagttctcatcttccttccagtcaacgtccgtcgagacgctgacgtccactccttctggcataacgccaccgtttcccatattgtcctcggggaacttcaactcctcgtctagtgcgtcttggatctttgctcctgtccatgttgacctcaactaacaccatgaccagcgcgcctaccgcccacaatctttacaaacagcacactaccagctctcttttcaaactccaccaggacctcgacgtccttctttcgttcaacaacttcatcttcttcttttaccaagagcagcaccagctcgcgcactcgactgacttcgaccacgacctcgtctgccccaacagtagtgatcaacgggttcggcgatgatgccggcggcgtaagaggcatcccggcaccgcaacctacggccgacgacactgggtctgatcctggccctggactgacccctgaggccagaaacgccgtggtcggtggagtggtgggcagtgttgctggtatcgccattgtggctttggtcttgatgtttttcctcaagtggaggaaacagcaggggcgaggaatcatgctgcttggggatggagacagcacaattcgcggcagaggtctcggatccggtccatcatctgggcccagcggaggcgcaggaagaatgtcgcagatcaggttcccattcgccgttccatccgcacttgccaagctaaacggaaaccgagccatcgaggcgccaccgaccgaaccacaagagaagggattctatcgcgtttctgggaggaagttggtatccgtcttggagtcggggggggatggatggtccgatccggatccacgcaacagtgtcggcacgtcttactacagggactcacaggccttcctcgaaagttcgaacctccctcctttgcaactaggctcaccgatgcgacccgaaagcggtgttatcgtttaccacgacggcccagcacgaacgccaattgaggagcactcgcctatgccgggcggtcaacgtcgttccgcatttcccaatctgctccaggtccaggatcccgtcggtcgaagtatcaacgtacaacacgccggatctcgcgtctcacaatctcgattcaccgaagattcatagcgtctgaaaacaatagcgcctgaaagcatagcgtctgaaagcatctgcgctcatctacagcgtaacacttgtacatgcccgcacacacctacacctattcaataatgtctgggtttaccactggcgtcagagggtttgagagacaatactcatattttttttctttctagaagagcgagttatctttggcttgttggtctagccccatttttcgatacctttttgcttgtcatctttttggatataccagaatctattttttgcgattttccggtcagacacaacagccgcaggacctctttttacatggatatacattatttgggatgcgaggtcttggggggctgtggggtgctggttttggaaatgtattggttgcttttgtttggctcgactgggaagatggaaatcaactagtcgcgtggaacagaagatttttggacttggagggttataaaagggatcgaagaaggagagcaagcggatgcgtatgggggggtcttttatgtgtgtgtgtgtgtgtgtgtggaaaacttttttcttgtatatattggggccttttttattttggcatgttatttgaatgtagatgttgaatgtgtttacttgtggtgtcttatgtctatctggggattgagcttacttacgtacacttcctcaacactgccacgcttgtagaaacatatacaattgcaacttggacaatcgcaattcaagtttctagcttcaaacagacaagcaaggccggcgcttgagtcttgaaactggccaagacttgcccttccaataggtatctgtagtgcaaacacccatcgttgttctcagatagataaaaccagtatcatacctactctcaacctgccagaggtatcactttgttctacctggcagcttattttctaccaagacagtttcttgcaagatgttggaaaacgtgcttgacgagcttccaaatcccagccgtgacatgtaaccattatcctgccacaaaatcaactctacaactctcaaaatacgcaccaaaaaaagatacaaaacatcacttgcaaatcaaagcttagacaaggcccagtcgtcacacaagtcacctcaaccaagtcacaaataaaagaaacaaacatcatgtatgacacttcccccccccccctccaccccatcctatctcaactagcttgctatacaaacgtttcctctacctatacaactcccccctgcctctttcatcagaataaaacctatcccactcccctgaataatatccacctcccctactctaaccgtcatgatatccatcaccacccggtctaacactgcctcttaaccccactaaacatctcctccgccgccctccacatactactcgtatcatccattcccatcagccccatccccacggtccctatccctatgcctgggtggtacaggcggaggcggaaaaggcaagatctccgcaggatactcctcatccatatcatacggactccccgcactactcctactgttctcaatactaccaatagcactgctcgcctccctcggcaaacctctaaaccttctcttcatcctttccgtaaaactttcctctcctgcttgtctttgctcaacctgctgcagttctaaagatggcatcgggctgagagaaggactgtggacgggtttcttctgtccgttccaactggggtgaagagacaaggtgttttgttccggttgtaaatactgacgctgttgctccggcgcctcaataacaaccgccggctggttatacccactcaccacctcccccttctgttcccaacccccaacctcatcataccccccagtataacactcctccataaaatcatccaccccatccaacacccctactccctccccctcaccacccacctccctggccctcctcgcccgttccctaaccctctcaaacatcccaaccctctcctccgccttctccgccctccccttccacacatccctctccatttccacctccctcaacctctccctcaacctctcgcactcctccccgacatccgccttgacaaccaactccctcgtcaactgcgtaatctgccccgacttttccaccaactgcatctgcaaactgcgaatctgagcctccagagcaatcgtctgcgatttctgccggccggcactccgctcctcttcttcctgctgttgctcaggaaaccctggatggtcaccaaaactcgaagctctagaaggtgcagaccacttctccttgaccgtgacgtgtgagtcgtcatcgtttcttgtagtccgggaaaagctgacacggtgcttcggtgtagtaacctctgaactcggcctacgaggtgcctcccgctcaggaggagccggtgtcaccaccatctcctcatccacccccttttccgcacccgcaacaaccccagtagccttcgccttctccatcgcagcctcaagctcatcgctaccctcccccacaacccccggcatcttctcaacctcaaccggactcctcaacctccccggactcgccccccaaacagccgcagcctccatactccccttcgacctcctcaccggcacaacaggcggcaccaacgtccgtcccctctccaccacctcccctggcatactctcagacttcctcatctcaatctgcttaaccggacaagctgacggcggcggcttcaacggcgacatcgacttcgacggcgaaacccccttcctcggcgaagggttaaccgtatactgcgccaacaccccactcggcttcaaatcaaggcttccccccccaaccttctgcataggcgacggcacaaacgcctcctctttgctcgcgctctcaaacatcgccgccatggccttgaccgcgctgccgactgacgtgaccggtctcaggtaatgctgcaccgtggtaccaggggtcgtcaccaggacatgtatccattcagtcgctannnnnnnnnnnnnnnnnnnnnnnnnnnnnnnnnnnnnnnnnnnnnnnnnnnnnnnnnnatgtattgattcacggaatccttcgcaggaggtcgtacccacgagaggactgaggtcctcctgtatttcctgtattcatctctgccgtatccttatactggtcatcattgtctgctcgtttgttcaaactcagctgactcaactgcttcttctccgctctcatgcttcccgtcacgtcgttcttaaatcggatggaatctgcggagatcacgagtcgacgtctggccgtcggagtcggagaggcaggagagggccctctcggcatctcggggacgttcatgctgatgttgtctggagtgggataacgagtacctgctgttccggcgccggttgacgagctcgtcagcactgattctcctggagcccaaggtgggggtcgttggcgaagagagagaggctcctccatggccgcatactgaacggtttccaaaggagcgggagggtatccatacatctgctcaccagcggcatcgtggtaattctgattatggtgatggcccgtcagggatgttgcttccgggtccgcgagcgatggctcctcagcagtgggcgacaacaacggcatggaggccatcgcgccaactcgatgttgggacgaagagcgagcattcccagtccttggccgttgccgctgcaccgaaagtgaagaccggctcatcccgagtcgtcccggccctccaccggatgctcgtccttccgcctagttagccaaccgtcccgagtctagcagccatccggaggaagtagacttactagcgtcaggagtaggactaggcggaataggtgatcctccttcttcggattgcctcgagtgacgatttctcaacccgctcccccattccgcaggctttctcaccacaaacgactcagacgcagaaggtctgagcccaccagccttgtcctgcagagactcctgctgccggtagtgatgccgagcatgctgctccgagattgccgtcgggctggacttgagcacgtccaggttcttcatatgcttgacaacctcccgccagtgcacaatcagcatctcagcaatgctgttcgcaacatgtatcttgtcaacagacaacgcccctcgccgcgaatgactagcctccgtatccgtggacgttttacacttcctcctctctcgtctggcagcaggtggcgtaacaggaaacaacaccagcccctgctttggattcgcaatcctcatcgtatatccatgaatcaaatcccccaccagcaacggcccaaacacaatccctaaagcgttataccccatcaaatccgccgtaggcagcggccgtcccagttcatcctccctgggagtcttctccgccgtcctcccaatcaaacacagcaacccaaacacagcacaaatcaactccctccgaaactgcgacttgaccgtgccaatagcaagcgcaatcaacctcgccctcaacttcgtctgcttcgtcctcggaaactctggatcccccttcagctgactgtgaatagccaccaaggcatcaaacaaggccaaactccccaatataccccccggcagtcccgccagcaaccgtttaaacgtcgaggccacatcgtgcgtcccaaccttgatatgactcggcagattcggacaccgaatcgtactcgcaatctcgtccttgtccccctcggcacagcaataatactcatacagcgcattcactaccctcaccgatcccggaatgcgaaacaccccctgagtatccgccgcatgctgaaccagatattgcgccgtcgcccgaaagcacgtcggcagcaccagcgatcccgccgcatactcgctcggcagatacaagaagctcttcccgcacagcctcaccaagctctgcaggtcctcatccttgagcgaatccctcctcatcatcaccccattcaccaaatgcatggccaaatcactcacgctcctcttatgcttcaccatcttcttccccttttgatcctcccccccttccgcccccgtcgtagtcatcgaccgcccactcaaactcgcaaccccactcccacccgagacctgcctccccagaaacgtcctcgaaaaccaactcctctttgaacaatgtcgattattctcctgctgctgcaaaggcgacctatccggctgttgcccttgtcagcccccctcctcacccaacaacaacaacaatcaccaagaaacaaacctaccgactcttgccctccccccccaccctcaaccaccacaatccccctaaccccatacttcgccgccaaccggttatactcccccacaaactcgctcctatcccccacctcatccgtatcgctcaacccccccaaatccccgctcgagctcgtccacgtcgcactgctatcattccctcctccccttccaccaccaaaagtcgccgagtgcggaagcggtagctgtaaccttctaggtcctatcccaggtccaaacccaccgccaaccggtgaactctgaaagttccccccactgctgaacgaccgtcctcccgcgagattggatggctggtgggtttcgagggaggcatacctcgacgacgacagtgacggccccgcctcgtcaatatctgataaaggttcgtgggtgttgttgtcatcctcctcctcctgatcaagcgactcgctcgaccaggtccgttccatccgagcgcgtcgaccttcgtccccatgacgaggaggcggagaagaaccgccgaaccggagggtttgttgatggtgctgctgctgttgctgcatcatctcgtttgttgtatccagtaaacgacaagggaaatagcaaacaatcgaatcggagggaggaagagcgcaggataaaagtattattcaacacacacacacacacacactcacacacacacactcacacacatacacacacacgagaaagatgaacagaccccaaaaacaggattgtcttcagcagacggtctgtctttccccccatgcttccaaacaaaggaaagaaagagattgtgtcaaggtcaaaattagaaagaagacctgatggtgtgcatcatctccttgtgcaggcaggtaggtgcatctgcaagctgctgcaacaacaaagaggcaggcaggcaggtacctagcaacgctagtgtgtcagttaccttaggcttctcccctctgctgcttcccgttttgcatgtttgacttccaggttgttcagttcaggcaggaggaattggatgccccttccaacaaacggaagaaggagggaccgtgggcgagtaaagtgtggctggtgggaaagcttcaaagggacaaggggaacagacaccacataaaacatgtcacaaatctcaattaataaacagaaagagagagagagagagagagagagagagacagagggagggagggggagagagtcagagtcaaagtcagagagaaacaaaaagtctataccgtggggtaaaaaatagaacaaaatatgcaaccatggtattccttgtccacatccggcccgtgacgccatgcaaatgcaaatcaaaataaatcggagtcaagcataacccaagaggcctggtgagggacacagggtagatactggtccccgttccaaatattatcatgcccatgccgccccccgacctaattcccccgaatatcgtcgtcctcctcgccatagagcaaaacatactttagaatgtccgatagtgaaatgatgcccttgagacggttatcgtcatccaccacaatcaaccgatgcacccttgacttccgaattgtgtcaaagatggcatccagccggtcatcctcattgcacgtgtagatgccaccgaattcttcggcccgtctggacagcgcctcgcccaccgtggcgctcagctcgtcgtaggcgccacccttgatgcagggtatcacatcgaccgcctcaaacaggttcagaaccctgttgtccttgtcgatgatgggcaccgccgagatgttgtacttgaccatgaggtgaataacgtcgagaaccgaactgcccatggtggccgtcgccaggtccttgtaggtgcccagcccaagctctcggacgggctttttcagcaacatggtgtattgttcgttgttgacggcgatgaacttgaggatgcggtactgcgtgatgacgctgacaaccatctcccttcccgtctcgtcgtcccgatctaccaatgggatcctcctggctctcgttttgagcatgcgccgacatgcctcatacaaggggcgcataggatggaccgacaccgtttcgagcggcagcacgccaatcgccctttcaatgtctgccgccttcattttagcccccgtctctcctagaaaacctcctttgcggcggccacctacctcgaagactgctcaggcggaactgatcgatgtgcgcaatctcgtcagggaactggcagtagtactgaatgacattgataaagtcggtgctcgtcagcaggccggcaaaggctgagttctgcgaatcccagagcggcgctgacacgatgcctgcatgttcaacccggagtcagtacgtcatggggtagcagagggcgtcaaggaggggtccgcgaaccgttttgtatgagaatgttcaagctcttcttgatgagcaggttgttatcgagcacaaccaaacggaaggacagaggcaagacatcgtaactcgtccggaccttgaggaactcgcgcacccctctctgtttgtccaaaaccacgcgttagcttccatgtcgaggccatcagggtctgctgcagcccatggccggaaccccgcatcagcagcagttgcattgcgaggttgggagcgcagggagacagcggggttcgttcccagccaggcgggttgggcgcgtggccattcggaacatggggaggatgggtcgatgtatgtttgaacatgtgtgccaggcaggccgggctgtctatgtatgtatatacatgtatatcatgtgtgtatcatgtgtgtgtctgggtgcgcgtggatgggaagggcgcgggggttgacaggctgggcaaggggggggggcacgatgggtgttagatagataaatgctcaccagaccctgcatctgctccttgtccagcggacctgaggctctattatccgacattgtgcgactgatgggctttggacgcaagtaggaggacggggccgcgacaaaggggagctcgtgaccatgtcgcagcggcagcgggccactggaattggttccagccgcagaggttgtggtgggagaggaggcaacaggagcactgccctcggtggcaggtccaggatgtgccttttcggcgggcgtacgagtgtcgtcttccattatcgtgatggtggaacgtggccgcacatagggagggactctgctgttccgcggccggtgcgcttcgccaggcgcaaaaaaaggaaacttgtctctggggtccaagttccagacagagcaagcctcctttgcggtggaaagtgttgttgtgttgccgcccagcgggaccgaggaccggaggtagtcgagaaggggcagaccaggagggagggagaaagagagaacaaagggagctgcagccactctctgtccagatgctcgctaggccaggaacaagacctctcttgtctggaaacttgtgatacaacggggcgggcacttggagagttttatcgggcaacagttccagagctgcttggctctgctttgcccgataagaaataataaggtgcgacgctataccgctggatacctgcgattagtgcatgtggatgccgatccgtcctgtggcttggggctgtggctccggcacgccatttcgatatgtcatggcttggttcaaagagccacaaccttctggcactgcgctgctgattaccagagtgagatgtcatattttcatgtctacacagtgttgtcaagtgatctaattccatggtctggatgaagctcctctggttcaaccactgacagctccctatctcgagatgcacaaggtggggcacaccgagggtagaggggctggtccaaacgtctggaggattgtgatacaaaatcaagcaggttataagtcgtcaaaagctatatgtgctagttaatccatccgtcttggtcgatttcaatacgctgtcacagggtccaaatgtgaaaatgttcaaaatgtgatggtgatgagtctcgggattagaggaacggaacttttgccccgccattcccaagcatgacttcattgcctgtggccttcatccttcccaccttgggcacggcaacatatagccttcttggaggattgcggtgccttatgggatgaaccttggagtatttgcaggtttcatggtgtactcatcccacaacagcgtccaaaatattggattgtgttttatgcgcgtagagttttctggatggccatcaaagatcaccgcaggatgctctgaaacaggtatgccgaagccgaagatcggggccgttcacagatgcatacatagattgcaggtgctccatggatatgcgccacaaccgctgtaaattgtgtctcgtaattgatgctccctgagccatatgccactcttgtgctcctagagtagcagccttctatgtcctacaatatctgcttggccattggctagacagtccaatttttgatatgaagtcgatttcatctctggggaagcgagccgaactctccacacttgccaagtggaacaaggcctgataagccaatgttcagatgttgacgtaggtaatccatccccgacggtcgtctcggagtgaggctgtcaggagagggcagacatgttcgtctggaagggcgggaggcgggaggcgggaggcggggaggtggtggtcggtgaaggtggtgagcctgacgtgcctgaccggcaacacgttgtcgttcttgagctgtcacagcttccagggctctgtcgccaactcatgttgggtgagtgggttgccgttgccgagctgcagggtacaaaggtacaacatcaagcagcgcacaggccacagcaaccccagaagctgtgttggataaggcagcgtcgattcgatgacatgagcgcctcccattgtgcgtgtgtgcgtgtgccgtgcgattccctggtgatccaggtcccccaaacaacaaacaacatcggcctcggcagcccaacgcctgccaactcaacctgaccgctaggtactggccgccactgtgaaccccatcaaactccccattcgagggccatgtttctttgatatcttttctcttgttgcacatcccgcccccttccgctgcaagccagcgacagccgccaaacgaccgagcttgcttttcaatacctacaccacaccagacaaaccccgacatcatctcaccccgagccttcgaactcggaccccttggcgctcttccatcagccgccatgggtgtctgtaattctacttgttgtggaggtacgtcttttccgtgtccggtatccgatagggccgttgcgctgatgctagattccgcaggcaaatcccgcgatgggctatacgaaaatgtcctcgccgacaacgaaagggaggccgtagccgaccttcttcaataccttgaaaacgtacgctgccacggttattggccgtctacccgttgctgacatgctgatagcgtggagagaccgatttcttctccggtgaacctcttcgagctctgagcactctcgtcttctcagacaacatcgacctgcaacgaagcgcgagtttgacattcgccgagatcacagaacgaggtgcgtgggcaatgacccgcatgtgcggcctactttccgccatgctgtccaagcacgggcgagaccaggccgtcgccgtgtgcaaatcgctaacatgtgatcttctacagacgtacgagccgtcgaccgcgacaccctcgggcctattctcttccttctggagaactcggacatcgaggtacaacgagcggctagtgccgcgctgggaaatcttgccgtcaacagtaaggacaccgccggcaacctttcgcggagcaacgccatcggatgctaacacaaacgtacagcggataacaaggttctgattgttcagcttggtggtctccaaccccttatccggcaaatgatgtcgccaaacgtcgaggttcagtgcaacgccgtcgggtgtatcaccaatttggctacccatgaggataacaaggccaagatcgcacggtctggtgcccttggtccattgacacgcctcgccaaatcgaaggatatgagggtacagaggaatgccaccggggctttgctcaatatgacacattccggtatgttggttgtcacgacttctgtgctcggcaaatcgcggctaacaagttttgtagacgaaaaccggcaacaactagtgaatgctggtgccatccccgtcctcgtccagcttctttcctcggccgacgtggacgtccaatattattgcacgacagccttgagcaatattgctgtcgatgctgccaacaggcggaagttggcgcagtccgagaccaggcttgtgcagtccttggtgcacttgatggattcatcatcgccaaaggtacaatgccaagccgccctggcacttcgaaatctcgcctcagacgaaaagtaccagctcgaaatcgtccgcaccaacggtcttggggctctcctccgtctacttcaatcttcttacctgcctttaatcttgtccgcagtcgcatgcatacgcaatatctccatccatccttcaaacgagtcgccaattatcgaagccggatttctcaagccactggttgacctcctcggttctactgataacgaggagatccagtgccatgcgatctcaacgcttcgaaatcttgccgcaagctctgaccgtaacaagtcgctcgtgctcgaggcgggcgccgtacagaagtgcaagcagcttgtactcgaggttcctgtaacggttcaatccgagatgacggctgctattgctgttctcgccctgagtgacgagctcaagacacatctactggagcttggcgtctttgaggttttgattccactcacgaagtcacccagcattgaggtccaaggaaacagtgctgccgccctgggcaacctgtcatccaaaggtcagtggtgttttttacagtgtattgtgtgtgtgctaaccatttctagtgggcgattattcgatattcatccagagctggacagatccttgcgacggcattcacggctacctcagcaggtttctcgccagcggagatgccacctttcagcacatcgcgatctggacgctgcttcagcttgttgaatccgaggataagaagcttattgggctcattggcaagtccacggatatcatggaaatgatgaagcagattgccaaccgacaggtcgagtcggacaacgagctcgaagacgacgatgaaggcgaggttgtcagtctcgctcagcgctgcttggagttgttgggtcagggtgcgtcgaagagtcatattgagggttgagaccggcacggctcttcaataggaggttgagcttttgttctgcgcttgttggcattgttttattggttcattctggcttaaaatattcattcggcatagtactcggcgtggagttggcggcgtctgtatgaattaccatgcacggaacgggaaggaaggaagtatggaggaaaggggggggtttcggaagaccttgtatcttgaacctgaaccggtcgagcatatggaaggggtcgtggcggtggtcgggttatggaacaggacaaaaagaagggaagccaggacatggagcacttactacatgtttttttctcctctttttcaaaagacccgccggggcttcttttgggacctctttttttcctttgtactactacacattaccactatggcacacagagagagaaatagtttttgtgttttttttcttcgggctttgacagtgtttttggcctctttggggcgtctttttcactatgttttatacacgggttatgatggttgttgttgggtgggggaagaaggggggtgggggggcggtgattgtttgttgctatttatttttgatccataccaccttttattattgtgaattccaacttttattccggcagcattaatactatgccttgattgttgttttgacctctgttcattgtgggattgatgacatgaatattgcagagacaataagtaggttcttggcagatagttcatgtaaacaggagagaaggtgagtagtattttttttttcgggggggggggggggggttaaaagcaaaaatacattcatcattccagtcactgtggcccnnnnnnnnnnnnnnnnnnnnnnnnnnnnnnnnnnnnnnnnnnnnnnnnnnnnnnnnnnnnnnnnnnnnnnnnnnnnnnnnnnnnnnnnnnnnnnnnnnnnnnnnnnnnnnnnnnnnnnnnnnnnnnnnnnnnnnnnnnnnnnnnnnnnnngtttgctggcggtgttgatgttggggttgggtattttcgggacttgtagtggtggtgctgtaagactgttggggtggtgagaggttggtctgtgctggtgagatgggtgagggtctgaatgggtgtggttgtgtgagtgagagccgggtgagtgatctgtgaggtgagaggttgtgtggccgggtaatggctcgtaaccggtagagactcgacattagttgttgatcgtttgaaactccttcaatcgctgaactttgactgacaacaagtgcgatatcgtcctcttctcacaccggggttagggaccataagtgaagccgtctaattggaagttgagcattcatgaacgaagaggtcatgccaagcccccccaatgttgctagccgtggtagctgcaggtgagagctccaatgcaacttcatgattggctaatattctccgatgggaaaccagtaacggcgcaaatgttgaacctcatccttgggcttttcaacttttccaacctcagccttaaacagccgacaaaatgaagggctcaccgtgtgttttcagctcggccgcagccatccgaagcgtattcctcaacaatgcagcccccatcgccggccccgcgcaccttcagcgacttttattgccctcattagcaacaccatcgcggcaacgttcctttttcgggcgagcaagcccagaaaccgagagattcccagttggaacatttcgaagatctcccaccttggacagaagagagccaaaagtcaccgatggcaggattctaaactacaacatcagaggcaatatggtcgtcatccgcaccaaagatggcaccctcagcgaaccccaagacaagatcgaagtcttgcggaatctagacttgaacaagagcgcgctcgaacagattgcagagccgcattctggccgcccgttccctatttgcaggattattctccaaggggacgagcaaaagaaggcgtataaacagatgaaggcggagaagaagaagctgcagaatggggtcaagattgtcacaaaggaggttgagatgaactgggcgatggcgccgcatgacttggccacgaagattaggaggctgaaggggttcttggagaaggggtatagggttgaggttacgatgatgcatcccaagaagaagagcaagaggaaggcgaatgatgaggaggcgaagcaggtttttggtgaggtgattaaagtgctggaggaggtgcctgggacgacagaatacaagtcgagacaggggcaggttggaaagacgcagttgttgtttttgcaggggaagattcccaaggctcaacctgccgctgctgggatggagagctcgccagagacggctgatgagagtgctggggaagaaaaggaggctgaaagtcaggaaaggtcggatactgctggaagctaatcatagcggtcgacagtatgtataattttggcacaaatgtacaatagtagacatgtaaaaacatttaatgaggccatgaccactcacttatgatcaagacaaaggccggatgcattcaggcaccataaagacgggagggaacgggcatttaagctctgagctaagagagcaggggttctggctgttgattggagagataacccgcagaatgcggggcgcggggtgctctgccaggctcatgtcaatcgcgcagccattttccatcgcctgtgactcaatctcacaggacacaaatttgtggttgacgaaagcttaagggtgactgcaatttgcgcccaaaacccagagacacaaaaatcaaagacagattctatccccaaagcccaattaaaattcaggtttttctcatcttccgaaaagagaactcacacgacgtcagacccggcttcttcaacttttctacatcgcggcgcaacccgcccccaccatcgtcaagtcccccgcttgcattcattcaccaaacaaccaaaaccacccacacgcaaaatggccaccgagagtaacggggctccagctggggctccggcccctcaggacgcaaagacatcgtctgcctcagcacccgccaaaaccccggctgctgcccccgccgcggccgccaacccagagaagcttaccccagcgcaactaaaggccaaggcgaaggctgagaaggccgccagacgggcaaaggtcattgagaccaaggcggcggtagcggcggcgactccggcaaaggaggcagggaaaggcaagggcaagcaggacgggcaaccaccacagagcaagcaacaccggggctccatgagcgggcggcggccgtccattgggggccctctgatcgagaaggagaaagatgctaggagcggaattcccgagtgcttcagccatgttcccatggcgaagcgggtgcagttgtcgcagacgcacaaggacgtggaccccgctgtgttggtggcgggacagcagatggccgcttttgctatcaaggatagtatctctcgtcttgaggcgacgttgttggcgttcaagaaggtttgtcttttatggataatttgctgctggagccagcttgctgaccgagatgacaggtgattgaatcctacgagactcccaaggggaactcgttatctcgccatcttgtgccgcatgtcctcaacccacaaatcgagtatcttaccgagtgcagaccgatgtgttttgctatgggcaatgccatcagactgctcaagaccaagatcaacagttttgatatcaacgaccccgaggacgagacaaaggaggagcttttggagtggatcgacaccatgatcaacgagcgcatcaagctggccgagtacttgatcgcgaggaatgctgcccggttgattgaggagggggagaaggttctcacatatggccggcacaggctggtcgagaagacgctgttgaaggccaaggagattgggaaaacgtttgatgttaccatcattgacgacccgtatgagcgtggaggccagacgttggccaagactcttcgtcaggcggggatcaacgtgctctactcgccaaatctgggcgggttacggccaaaggttgcgggagctacgaacgtcattctcggcggagaggccatctttgctaacgggtcgcttaatgctgcctctggcacagcggatgttgctatggcgggtcagaatgccggtgccaaggttacggtgctctgcgagacgatcaactttgacagagagcgtgtgtcggtggacgcgctcacttacaatgagatcgatcccgaaaggaataccgccgagtgtttccggctgctatacgacaacacccaagataagtatatcagcggtgttgtaacagagtttgagagcgggggtggtaattctccagcccaggctatcctggcgctcttgcggatgcgggaagatccccagattgcttagttggcactacctggagggcaaactggagggcaggcgcaagggaatccagcggcgtacgaaaagcattgacgatagtgtagcctggtgcatttgttcgagggtttgaatgctgtagcttgggaatagatggaaaccactcatgcgtggaagagtgaatgatatccagagtgggaacagaaccaatttatacgctgagctcacctcctagctcccaatccgtggccgcctcgtttgtgaaccattcaaggtgaaaatgtacttgttttgttcgccgttcctgcctctatcatactgcctgtctgttcaaactcccatcaccccctcctatccttcctttttaagcctggataaccgaagggctggcagcagcagccgcagcctccctctctgccctcctcgctctcttctccagaatggcgttcttgcgctcttccaggagctgtgtctgtctctgatccacaccctccagccagtatccaaagctcgcaccgacggcgccgaagacggggtaggcccagagggtctttctgtggaaaaatgggcgcatctcgatgccgagctgccagaagcgcgtcgccaggcctggaggggaaatctcatgttagtttgttgttgcgtatagctgagaaattgggagcttgggatcgggccataccgaagccggtccagaagacgagtctagagaccatttttggttgatttgtgtcggagtaatggtgggtgaggaggtgtgtgaaggtgagtggctcccggcccgcgacgctggtattcttggaggaggatgggatgtgttgctgggtagcttgccctcaaaccctgaagcttttccaattgactctggctgctgctgcgcacacccactgcgggatcacgactgacgttgcttgctgcttgccaggtgccagctcggtcccacctggcaagcaactgcaaggctggaagtggctcgtgctctcatggcttgtggaatccctgtcgttgcattctttcccttgcattcaacccctgccaacgccaagatatcaggcgcccccccactagaatctttctggcgtgtgttgaaggttcccccgtcactcgcagcaattggacgcgactggatttcttgaacgtcccaatcgttgcatttgtcaaaagtttgtttgttgtacaactaactgccttgtgctattgcgtcttttttacttgttcatttgttccagccaactctcgaaaagcgacttcttttttccacccgactttggaaatgccctgagcaaaaatctcggtgcccattcaaccgactgggtgaacggtgtccccttccttcctctctgtgctgcgacaacgaaacagaaagcgagcgcgcgttaaacgataatcaaacctacatcgcaatcatggcgaccgcatcaatggccgatgcgccagctcccaccccccctccagcgcccgcgccgccagtcgtgaggaagttcaaagcctccgatctccccttgtcacaagtcaagcgagccaccatcgacagcctagcccacagcttcaagaagaagggcggttatgatgccgtgcgcaaggaagtatggcaagaattcgaagtacgtactatccctcacaacctctcccaccacccctggggtgctctccgactaacccagcctcacagggtcaagaagccgagatcaccaaagaaatacttgaagtcgctgaacgagaaatcgaaaagaaccccgcccagctactaaccctcgagcgaaccaaagccgccgctcttatcgatggcgcgctcgatcgatcgggcgtttatcagagagccgaggagatgatcagcaagctgatcaaccggggcgctattgaaacccaacttcgcgagctccgtcgtgctgagataggagatgaggaggcggagaaggaacggctcttgggcgcaaagactgacgaggagtatgccgccgagacagccgcgcgccgtgcgcataatgagcgtgtccggatggagcttcaggcgatagaggagaacaagaggaagttggagagggcgatcaaggagaaggaggatgccaagcggagagaggaggagagggctgccagggaggcgaggaggaagaaggagaaggaggaggatgagcggagggaaaaggagaggagggaaaggagggagcagcgggagagggagagggaggaggagagggaacagagacggaaagagcgcgagagggaaagagaaagagaaagagaaagagaggaaagggataaggaccggggacgtgatgacagtcgggatagggaccgacgacgggatcggatccaggttggatatgacagctatcgagggtcgggtgatcggtccaaccgggaccgtgacaggagtcggaaccgtgatcgatcccgtgacagggggagggatagggaccgagacagagatcgtgatcgagaccggtctaggaagcattctgctgagaggaaaaccgaagaggtcaagaagccgcttacgaaggaggagcaagagcgcctggagcaggaggctcttgcggatcttctcagggaaagcaagcgtgttgcgccgaagcagcccgagttggagatcgaccctgtactggtcccaccgcctagaaagtcaaagccggtttcggccatcgatcccattcggagagattcgccaaaggttgccgccgaggttaaaaagccagaagagccggttgtgaaggaagcggtggagaccaaggcggcgcctgccgtcaaggagtcaacagatgctaaacctgccgagccgagagccgaaaaggagcgtcggaggagtaggagtccttcgaggcccgctcgtagggaacgaagcagggagcgggacgatgaccgtcgacgacctcggacccggtcaccgcgaccaaggcatgacgaccgtagtcgttccaggagaaggagtcggtctagagtgcgagataggagagatgacaggagggacagaagtcgttcacgcagaagggatgagaggagggatgatcgccgtgacgaccggcgtgatgacaggagagacgaccgaaaggtcgaggagacccccaccaagcgaaaggacgaggcggccattccaaaagaaacaccggccaaatcagaagcccgcgagcgcagccgctcccggcctcggacagccagaacagacgacaggcgggaccgcagccgttcccgccaccgagatcgcgacagaacccgctctccccgctctagacccgaccgccgcgatcgttctcgctctcgcttacgtttcaaccgtcgtgacagaacccgttcccgttctcgtgatcgccgggatagagaccgcgacagagacagagatagacgagacagatcgcgctctcgcaaccgcagccgagagcgtgaaaagaaggatactgccaccgataaagacgaaaaagacggcagcaaactccacctccgagaccggtcccgctccccggcttccatggtcgcccgcccgccctcccgcctcaaccagacggaaaaggaggcttggaaacaagccgaggtcaagaagagggagcaagaagctaaggcctatcttgcggcgcagaaggaggcgagggagaaggggctggaggaggggaggaggacgggggagaggagtccggaggttgtgaagaggcgggtggagaatagcgatcggtatcaacccggggagagggatcgggatagggatcgggatagggatagagacagagacaggaaggacagagatagagagagggacaggatggattacagggggggggataggtatgatggtgatcgggacaggccgagggatagggatcgtgaccgtgaccgtgacaggagaagagatgatagcaggggtgacaggaggaggagcaggtcgcggaatcggagccgggagagagaccgggacagggacagaagcaggaaccgcgacagagacagggacagagatcgggatttcagacgggatagggataggagcagagacagaagtcgggacagagaccgtgatcgcagccgacatcgcgagaggagtcgtgatcgggatagggatagggacaggagccggacccgcagggatcgtgacaggcgacggagcagaagccggggttaaagtctgccggcgaagccgcaagaactggtggtgggaaaactggttcagaaaacgaatgctcgcggtgatgatctttgggggaggcgagggatgagtataggcctgtttatctttctctaggcggacggacggcgaatgggaagtgagggggagggactggatagaataccgatataccctgtagagtaatagatgttttgtatgtacttgtatttctgagatgtgtgaaactatggacataaattgaaaggaaccaaaatgattcacagcatcatatatgcctttggcaatgggatagaatatgtacaatgaaatcgtgtcaacgcagtaacgtgaaaagaacaacgtaaacgctgattctgaaatgtcaaggcttgatcccttatccagctccctggctcttgtacacaaaacaaaaaaacataaacataaaaacataaacgcaaaaaaagaaaagagcccagtttaccccaattttcatacatcattacagtattcaaacccctccctattcaagagagatagagagagagagagagagagagagagagagagagagagagaaacaaacccaaaaccgaaaacaaccaccccattaatctaataaatcacttatgccccctgcccaatctcctccacctccttcgacaccggccccgtagccggccccccgctcccataaaggaacccagccaccagcaccaccaccgtcacaacaaccaaccccatgatcaacgccctcttcacagcagcaggtaacctccccgctccttcttgacttcctcctccctccccctggctgagcggcgagtaactccccgccaccctctcccacaagctcttggcgtacacccagacaccgaccgagatggcaaccgtctgctcccacccgagggagtaatacgccaaccctgccgtggcgatggcgtaacccacaaactggatcgccgtgatgtttgtcttccagatcatgaccgagatgatgaccagcaaaatgtttttgaggatgcccgtcagggtcattaccagccccgaggtctttccgatctttacgtggttgttagtatctttgtgctggacagttaaggggggatattgacttacgaggaaaacactcgaaacattcaacataaacgccaccatcgcattcagcaccaacaaccccgcccccgccctccccacatccccaaagtcaaacctgttcgcctcgctcccaatagccacaatcacattcatcaccgcgcagacgggagcgtagtaatacaagctcaccagcgggtccatcttcatgtcctccccgctcagcaaaacctgaatcatgatcaacctcatagcctcaaacacgatccccccaacctggaacaggaaaccagccatggaaaagttgatctcgcctagggaagcgagaccgacgccggcgacgatgaagaggatgttgaggaagcgcttgagcgagggctcctcgaccccccaggcccaggccgtgagcaggaccgcgacgggggcggcagctttgagcatctggatgaaggcgactgagaggtagaggtagaccatgttggagcagaccaggctggccgagtagaggaggccgatggggacgatggcgcggaggtagatgcggccggtcattttgatgttcttgcggccgtcgaggaggtgggtggtgcgggctaggatttgggttgctacggttgcgaagacgaggtgccagcaggtgaggatcacggctggatttggggggtcaatattcattcagtgtgtcagtgcgggttgtacgtacgatattctgcgagtaggttagcatcgttcacagtataggaagagatgtagaacagaaatacgtactgaaccccctcccatcaatcatccacttgttgaacagaatcgtcaagttggaaaagaaaatccacgctctatcccagtatcagtcctcatgttccctcacgacatgcgccgcctactatgacgtctctctggggaatgcatacaagatgtaaaagatggggtgtaatcctccccgctgaaccgtcgtcgggcgcggcttctcggcctctgccgcctgaggctcagggtgcaactgctgcctctcgacatcatcatcgttgttggccgcggccatcgagtccggggatccgggggtgctgtatgtctattcgggcggaatcggtaccgggcgcacgcgcgggcgcaaaaaagagatcggctttcgggttccgggtagtcgttaaggtttaaccttttgcgcaggggaagcgagagacaacttttgcgatgcgaagcgcgttgaacgtaagggagggtgtaatactcgtctggtcggcggcggtggtgattgatagtggggaggaggcagccagaaaataatttaacgagtgttttcccagattgctctctccgcgttgcgcgtttgctctcctatcggcggcagagcggaaaaagtaaaaaatactcaacgacccagagatcccgcgaaagagggagagaaggcaaaagagggaagaaatgaggttgtcgtgttcgccaaaagtgcaaaaggaccaacaacaaaataactggggacaggcaccaacctacccacgatggggacttgggggggggggggnnnnnnnnnnnnnnnnnnnnnnnnnnnnnnnnnnnnnnnnnnnnnnnnnnnnnnnnnnnnnnnnnnnnnnnnnnnnnnnnnnnnnnnnnnnnnnnnnnnnnnnnnnnnnnnnnnnnnnnnnnnnnnnnnnnnnnnnnnnnnnnnnnnnnnnnnnnnnnnnnnnnnnnnnnnnnnnnnnnnnnnnnnnnnnnnnnnnnnnnnnnnnnnnnnnnnnnnnnnnnnnnnnnnnnnnnnnnnnnnnnnnnnnnnnnnnnnnnnnnnnnnnnnnnnnnnnnnnnnnnnnnnnnnnnnnnnnnnnnnnnnnnnnnnnnnnnnnnnnnnnnnnnnnnnnnnnnnnnnnnnnnnnnnnnnnnnnnnnnnnnnnnnnnnnnnnnnnnnnnnnnnnnnnnnnnnnnnnnnnnnnnnnnnnnnnnnnnnnnnnnnnnnnnnnnnnnnnnnnnnnnnnnnnnnnnnnnnnnnnnnnnnnnnnnnnnnnnnnnnnnnnnnnnnnnnnnnnnnnnnnnnnnnnnnnnnnnnnnnnnnnnnnnnnnnnnnnnnnnnnnnnnnnnnnnnnnnnnnnnnnnnnnnnnnnnnnnnnnnnnnnnnnnnnnnnnnnnnnnnnnnnnnnnnnnnnnnnnnnnnnnnnnnnnnnnnnnnnnnnnnnnnnnnnnnnnnnnnnnnnnnnnnnnnnnnnnnnnnnnnnnnnnnnnnnnnnnnnnnnnnnnnnnnnnnnnnnnnnnnnnnnnnnnnnnnnnnnnnnnnnnnnnnnnnnnnnnnnnnnnnnnnnnnnnnnnnnnnnnnnnnnnnnnnnnnnnnnnnnnnnnnnnnnnnnnnnnnnnnnnnnnnnnnnnnnnnnnnnnnnnnnnattttcatcgagagtgtgttgagcttcttgcttgttgacaaaacccacccctgcttacggtacaaaaccagcagaccccagttgtcaccagcaccaaatccaacggccggggggaggcgttttttttccctgcacactctcaaatcggaccctttaattcgtcagcgcggacggacgaatggtgcaaccaatgtcgcattgagaagttgtagagaaatctggaccgcatgcaaccagggggcacatgaaataggggtcatgatagcagaaaaagcttaggaggcttattatcccttctcacctgcaccccttcaggttcatctgaatttatccctttcccagagacatctttttgcatttattatcaccggttccggacatcttgctctcgaaattccgccctttcccctcccaaacatagcatcatggatagcccagcggggtccccctccctgaaaaaatgacaccctgataggcgagaaaaagaagcggactctttaacatccgcagatcagcgggtctatcccaagtcttgatatcaacgacttctgcttgcattgaagatgttatcattgtgagaaacacctgtctaggagtcatctcctctgactctccccacctcgtcacacaaaaataccaatcccacaaagtaacgtcagcatcaccaccacctcccgtctgttggttcatgccctacaaaagtccctttcagaggttctggataggggttcgtcacaaatatagaacaaaagtaaaggtaaggtagtaaaataaaatttaaataagcagactaagctgtgatcggaaatttaagattataaaggctaatgtaaggtaatttaggtttagtaccgttatacctacgccaaaaactcacgataagcagccatgtacaactcgcaatccgctcatgtttggacacacgaccaaacgttaaaccacctacctacccctcggaaaatccgacaccttggaaataccgagccgacccaaaaccaggcagagcccaggtgtaaggtataatctccatgtgctgtgccaggtgtaagtaatctccatgtgcggcggtgtatgcagctcgtacaactgtagcatcttggaaccaggcacacacgcacacacacacacacacgcacacacacacacacacacacacacacacacacagatacacacacacacacacagatacacatcttgatttgcaacgtcgcacaacacacaacatttgtctaataatcatcttcatcgctgcctctcattcattttaatagttgttgaactcgctgatgaagcaaagctaataagtacatataacatcctcgatccatctgtcccatttccccacccaccggctaataatgttgaaacgcttcagcgctgtgttgttgtccatttatgtcctgatctgatccaagttcaagaatgatataaaaaaaagcaaaatacttgtcttggctcgtgtaataaagcccatggtatatccccccaaaaaaagccccaacaccatcgctgtgtagaaagaaaaatgcaaaatacacccagttatccaccatgaacaatcagtagtcactatcattgccgtcaggtaacggtatcgccgcagcttctgacaacgacgcatcaccctccgttgatatcgccggcgtttccggaccatcaaccttcaaaaacgacatcggcccctggatttccccttctggaccatcgaccttcaaaaacgacgacaccggcccttgaacccccccctcttgcatctcatcacaactcgcaagctcagcagtcatcaaagtctgctcaggatcaacacagtcataaaacagcataaacaccccgccctgcgccagcaccgtatcctcatccaccctggtgacatcctcatcactcagtgaccaccactgctcctcctccagatcctcctccagagtcccacgagtcaccggtgtcgagggtgcatccgcagacatgtccttctccgacgcaagcttaggcggctcatccgtcgctcctcccacttctggtgccgccgctggcggtgatgatgacttggggtgtttccgaaagcagacatagtgcccattctcatgtctaccatagtgagcaaccaccgcccgtaatgtgtatatcggaccggtaatccgggacgtcctttctcctcccgccaccatcgacgagcgagggtctgtaatccactcctcccgatccgaactcagatcccgacccgtcaggcctgccgcactcccaacacaccaagggcccaggtcaagctccatggggaaccgaacatttgctccgtttttgtataaccgaccagtacgttcgtcaaacaccgacctgttgatgtggaaaaccaagctttgcggtggacgggcgatagacgtttgcttagtcttggtagaactcttccgctgtgtccgagggatgttgcacttcttcagcgtatcatctttgaaatcctcctcctccaacgcctcctcaataatctggattctttccgccaaaccaggaatgttggctcgctccgcgagagcctggagaccactgcgggagttaagcaaggtgcacttggtacactcgacgtcctggatcgcctcaaggctggtataggcatccagtctctcataaagatcatgctccatccgctttccaaggttgagggtcaaacagttgaagggaatcatgtccaggccactgcagtagccgcatgagacacatgctacacgctgggcgatgagaccttccagggggtttcgagtcacgcagatatcttgcccatacttggactgactctccatgctatggtacccgctgtcatcgctgtgttggctcgagtccgagtcgtcgcgcgaccaatcaagctctaatgccggggaattctgaggattcttcaagctttttgcgacctccttgctgatctgatcgagaagcttggagtagtattcctgggcatcctgttgttgccaggtattcatcttcttcaaaacggccggcgtgcccagcgttctcccgttgttcgacaggttgttaagatccagaaccagcttatgaagcttgctgatcgtgaagctgtcggctgaagtcatggctgaagagactgctgagagatatcctggaaagggcctcaaagacgcgagtccctgaaggatactgttctgaaagcaagagttgtccatgttcaaaagtcccggaggctggtctggcgagcttttacgtgccagattcaacgctgcagtggacagggtagtcaagctcttgcgccccgcttcaatgcccgagttcaaaattcctgccgccgtctccaagcccaacatcttcttaagaacatcgctcttagcttcatgagtcgtaggtctatcggccgacgggggccgcggaaacagggaggggttgagaaagtcgtccatggcgtaaagcagcctggccggagtgatagccacgagtattttccagataagctgtgacaaatcagggaccctcccttgccgtttagcaatctgatagatccagctgacgaggacgacgatgagggttatgataatgcctatcgggccaacggcgcggtctttgagctgtcgcaaagtagaatgctgttgtgaatcgaggccaacgcgggtttccacttggcccagtatgcgccggtacgcttcggtattcattgtcggtgcggtgttgctgtgtttgtgatctgcgagcgagcagctggtgtcggtgctggtggcggcgttgcagagcggacggaagctgcgcaatcacgaagcagcagcagcagcgaatggaagtgagggttaacgagcgaatataattacttccatgacctcttttgagtttgtcgatggcaatgtactccgtaacctgttgaggttgaaaaagctgtgggcgttcaaatgcaaaagccagaagtcacaagaagtcagcatgtggaaaagagcaaagcgacaggggagggggatggatctgacgccagcaattggccgcctggcagttgaatggacgaacaccccagccggcggtggggccagtgtcagcccttctatcattccggctgttttgtgacggttattgttttcgtctggcttgatcgggatgcctcgagggtgtgtttgttgacgattcggaagacattgagttcactttgtccctatttgctgcaaagcgaccagtgtcccaacgcattgcaggcagcaaaagtcaaaaaattgaagctctccagtcccattttctggggagcagggatgctagcaaacgccaaatgctgcatccctgcaacgtcaagcacaacaaccccacccaaaaattcaggcttggcaagaaaatacacatcgataaggaatttccgcccgccgataaacaccaaacaccatcatcaccaaaccctcagacctcaacctttgctgcgccattctgctcgatacgctgcaaagttcggtctgtttacaacaaactccacaatggccaaaccaacaatttccaagggcaaaaaaggtaattctccacccatcccaacagcagtcgcagaatgtactaaacccccccctccaggcccatcaaaacactcccgtgcctcccgccgcgaagagcccatagacatcaacacggacaaatccctcaaatccgccctcccaccccccatctccaccgaccaccaccgccccgccgtcctcgccgcccagctcgcctcctccgtctccaaacccacccgcaaaaccggccgcaaagcccagctcagctccaaagcccggaagcgccaggaaagaagcatggacatggccgaggccgtcatggagcgcaccatcaccaagatcgaaaagagcaagggccacgccaaggtgatcaacacgaggaggaaaccatgggaagaaatcaacaatgacgtctttggcgagggcgaaaaggcgaagaagctgaccaagaagcagctggagaagcagagggaggatgagattgtgaggaaattctttgacgagggggcggcagagaaggatgaggatgggaatgtggagatggagggtgcggcgagtgagggtgagggtgagggtgagggggtgccaacgccggtgcaggttatggaggaggtggaggaagttttgtagggtcggaaaaagcaaaaggaacggattgggatggtgaggcgttacggacattacatcaatcatttgtggatcttcgggcttttaaaatctctgagatgtggaagaaaaggagtgtgttttaaaagggcatggtcgaggctaacaggttataaacgagagtatatatgagggcctcgagttgtatgaactcaaaaagccagcaggacaaaccggtcgttgacatagttttgatacccaaaaagatgagatgttttcttcgacgtcagatatgcattgcactatcttgaatgaaaattctccttcctgctcttgtatttgagatctctcttacaccattcaatactttttattaagattttctccccattttttcaccttttccatcgcaaccacgctcctcatatacccaccctccaccctccactaccaaccagccgcgggtttagctcagttgggagagcgtcagactgaagtccacttcaactcaaatccaaatatccaccaccaggataatctgaaggtcgtgtgttcgatccacacaaaccgcacttacaaaaaactacttttttcttctcttttagactttatcattcttttgattccacgcaacaccctccctccctcctcctcctcctcctcctacactatcatgacccttcctgttgtcccggcctatcaatcaacaagcgaccttttcacacacatcaccaaccaatcatcacccacccccaaaaaaatcccccctatgacgccacagcttacaagaccaacaccctctccaatcagccgcacagtgtcttgtcaaagcccccccccccctttcaccttttcttgtcagttttttttttaaaaaaaaaaaagaatcttaaattttccacatctcacatgtctgtcccagaagaacaaaattccttcttcaattattctactttgctcaactaccacacacccccaagtagcagcttctcatacaacccaaccaaccccaatcacgcccccatgaatcaaaccccccctgatcggcaacaccatatgacgtattaatcccgacgaacaaggggccaggcaggcaacacacgacacaacgaacgaacggattattcaacactcccaaaaaatatcattttccttccataaccatcatgatccagcccaaaagtaacgtcaaactccaacgaccccagcaagaacatataaaacttccggtatgaacatatgctttctttctctttcctttcctcctccgtattattagactttgtggctcgctagagtgttcctcagtatccccttattgtttttttattttttatttttttgaaatcttcttgtgtcgggttctttctcaactcttgaaagcgacgatgcctctgctcatcggaagcagtacccgacctctgggccaccaaggtttgtgtatggacgacacatcaaccagtcaacaacaaacgcccagcttcagggtcgatgattgtcatcttgtccataccctcgtggacaccagcatccttcttctttcaaaaacaatatttcgcttccttcttcaactcaaccactccttcacccctctcatcacgccccaaaaccctccaccccatcctccaccccaggactaaacatcgagtccggcatatgatcataattgaaccccgtcgacgactccctcttaagcaatcccccaccattcaaatgaacatggcccgcaccggtcgccgggtcatccaaatacgaaaccggaaacgcagtatcggtcggggacgcatacagagcagccggacctgggaaaggagtgtaagtctcaaactaggccggcaacaggaacccacctcccccgtcgccgcagcacccaccacccgtcggcgtggccgctgcccaaaacagagactcaccaggaggataagcaatgctcccctgccggtcactccccgacgtgctccccggccctcccgtcaatccctcaaaccccgtcatccccgcctggagttggtactgactcgaagcgatgctcggattcctgctccgtggtgatgccggtgtcagaaccggaggttggctcacccctgttgttggctgtccgaaggtgaacccggctccgaataactcgttgctggtctgcacatacctccgcgcctcgttgttcagccaccggtcaatgttcggatcgttgcatttggagtgtgtcagcaagtgatgctttagctggccgacctcgtgtaccaagccattgaattccatctggagggccgcatgctgggtttcaagcccaaccttggcctcttcgagttccgagacaaagacctttttcttttctcggcacttgctagccgcgatgcggttccgttcgagaaacttgtttcgtttgtgttcgtcttgctccatattggcctccttcttattttttcgagtctttcgcttcttatttggtgcatgactttgaagggcgtcttctgggagggtgatgtcggtggaagtgctccccgacttggaggctcggttcgactgcgatttgctggatgagcttcgttgggtggatgggcgagacatctccatggagagaatctgcatgtcggctttgatgtcctcgccgtcggggtctggatggtagagacctgggtcgacgaagagtttttgaccagcgttgggatccatggtggtgccgactggccagtcgaatgatggaccgcccaggtcgatatctggatgggggtcatcttgggatggagagggcccgaagcctagcttgtcgtcgtatgatgcaaagttgagctccatgggttgctcaccgacattgtggtctggtgtttgataggcaggcctctcttctaactcgtccaggcattgatcaaagtagtgggtgggctcatccatctcgctgctgtgatggtctgctggattcacccactatgcaatggactgccagctacaaccaagtggttgttaatgaaataccaagtggtcgttaacgaaataccaagtggttgttaatgaaaataaggtgaactcgatctctgcagcagagttcgggtttgatttttgaagtcctcaaacaaaacaaggttgataaagctcgacagggcttcttgctctggaaggaagactggagccggtgcggagataacctccggctagcctatcttcgttgggcaggcaccaggtacgggttgtgctggccgcggttaaacgcttctatatggaagtaaagcttcagtctctatgttggccgggagagctaaaggatgaaggcaggagcgaagcatcaaaatttgaaaaactggccgtcagacatactgtgatcccaagttggcggtttgtggggtgggctgtgtgtggtgtggcttctcgaaaaacggtctcttcggttcacggctcgctacgggaatgttgtgtgaccgcgtttggtctgtctctcaccctcgccccggaagtaggcgcattcctttgttgcgttttgcgggaacttgaattggtaggtgggaagaagcaaaggagtctgtctgtctgttactgtcaggcaatcgctataagccgatggatgggatagcggggtatagggttgtggttgtggtcgtggtcaaggaatcctgattctgagcgggcatagatccgacagctgcggggaaaccccaagcagccttaatggagagaggccagaacaaagacaggtctcgaagccgagctaccagctgcatgtccgatgagcttgctgagcttcatgcagcttcgtccccgtccagccgctgagctgcaccagccgtgcctggggccggacggggttatgctagcagggcggaacggggaggcgaaagacccaaggagctgcagcagaggtggaagtcgcctgtttggtgccttgatcaaatgtcaggtggtccgggtggcatcaaccccaaccgtcctgggccgagctcgatcgtgtccatgggacaagatccatcgtgccccagcagacagactgatggcttccaggttgcgcggggcggggagggtgcttggggctacatggtgtgtgtgtgctgtgcttcgacgggagcggagaagtaggtctgcgctctacctacctagtctgtcgtgtaacacggcctgcgtatcgaggtgagggtggagaggaagttgcggcctttggtggttctggaaaatatgccccgcagcatgagaatgggatttgttggaatgccataccagacccaaaatcaaaagcatttattcatctgagagtctttttcttatcttcattgaagaccattgctgaaaagttattcaattgatcagtaacatgggcgcactggggaccacaccgctgtccttgatacaatcaattcaaggcccatcaaattcatgaggatgctttcgttcaaggttggtttttttgctcgactcggagatagcaatcctgctttccaggttggtcggcagcagggcccacttggcaccggaaccagcccgctggctgacaggggttggcttgctgccagtgccagatattagagcttcactgggctcaccttagcttagaccttcccgaacaccttcctgatcaacaccgacaggtacaagtacgtgaaaacaggacaaagggccatgtaccggggagaattaccctatcgacctagctcggcagccatcatgcagatgctccgcgcgctttcttgcttaggatgcgactatcatacgactcggttgagcgcggtgctcgatgctctgcatagaagacaggatatgtggattatgaaactcccacgctgaaacctgctcgagagagtacgtcttttgatctgccaacccgataatcaactctctcaacaatcttcacgatgtttcagggtcattagctatccttgaaggccctcatccccaaatccccatctgacaaaccaagcgatctcccaaggaagtggaagacggacgccacctccgcattttccagttccactaacaaggagccctggttctggagaaggacgtctagcttcccagatatggattttgatttgaaagatccattgtggcggccaagtaagaaaaatttacacatgatcttgtaaaaaagaacagcagcatcaagatctctcctggggacaatgctgtctacgtccagttaccaggtgaggttgaaacaggatgctgtgccaagaaagtcaagacggtcccacaagacgccattcacactttgggctagcgctccactgcctgcctgcctgcctgcaagcacgggccaaactctatttggtcgccgctcataggtaggcgtgccaggcaccacctcgtcagcctcagacatctacttcaggggaccgatcaaaacatccgccaaattttctgcaggtacttactttcaagaagagaggaaagaaacgaccaccgacataccacgaaacacagtcaaaaatcttcataacagcggatacataaaaacacacgccatggagacctcaacacccagagttacctgcgcctacctcaactcatacgtcggcaggaatgttatggtcgtgggcaaagtcgcccaaatccgcggtgaagacgccatcatcgacgccgacggcaacatctcttgcaagctgaatcgcgtaagcttctccccctcatccatcttgtctctccctcaagcttccccacacaaccaatccaacctaatcgaccacaacatgcacaagatcggatcagaacacataaccacacagacatatcacctctgcagctccccgcattatccacaaccacacgcagacaaacaacaagctttccgagcaagcaaggctaacatgttgttaccctctgtaggatgcccacctggtcccgggcaacggtgtccaagtcattggcaaagtaaacccagacctgtcagtcaaagtcctcagctcccttgacctgggcacgggcgttggtgagtgtttttcgcttgcatgtcctcctccttgccacagataacactgacaggtatggttttcaacaacagactacaaccttgccaacacagtggtggagataacacatcagcacaagaacttgtttaccaacgagtagacgtcatacggaacttaatagagcatatacctattttttttcttttcttttctagcaactcgagatcggagatcctttcatggaagcatgactcgactattttttttgtgtggctcatagataatggcaaatagagctattggcttgctgataaatctatacattctctcaaactgttgggaacacacagacgttggatacgaggcctcatcccatctcagtctctttctcgcctccacactgaccatctgctctgcccttgaggttcttgtcgtccctcgccgcacctcctttcccctcacctcttgtcgccctgaccctgtttttctgccccaagctccctgctgctggtgctcccctcgccgattctacccgcggaaacctgtggtctagcccctcaaggaaaggatccgacgatggcatgtgatggggttaggagaacctacattgattgatcagcgagtgcgagcctggaagcggttatttcgctgcctactgaataggtgagtggcctttgtattcacagtacgtatagacatggcttttttcaagcttacgggtccatacacacaacggcaatatgtttataatgtgactcataaaatgtgctccttcttcccgacctatatcatgaatgacaggacaagatatggctttcgtgaataaagtgtcgtggtctttgactgttgtacaacagcccgggattctcacaacatcaccagttacggaaaaaccgcttcaaatacccgtccgttactctggtcagagagacctttgaaggatcttaaaccggaaccctcccccacacacacacaccaaaatccggagagcacatttcgtgaatctcttaccctcatcgcacaagcaccactattacagccaagaaatcttcatgtcatctcagtcaaacggacttgtccagctcttacactcaaggatacccgggaatgcgcgattattagttcatttcaaaagacagatatacccactgtcactcggagtccgtcctacgatcaccaggagagccagactgggggagtacagtaatgaggatctcctcctctgagaacagtgctaacacatctagtgacagtgagtggttttagattcataaagacactcggcaaaacaaaattcatccttaatgagatgtaaacaagcgacagccgcaatatgcagacccccctcccgtcccccctcccctcccgccttcacatacaacacgaacacacagacaaatccccccctcatacactcaatatcaatactctttgctttgacatttgactaacactaaagctaaagtaactcacacttcccccatcgctgcaaaaactcccttcccctttcccctccccaaatcataatgatgtaatgccatcaccattccccccccccccccaaacgcgctcagtcccttcttccaacccagaaccagatatcctgttcccctttttccagatcacccccccacccaatccatccatccaggctatgcggttcaaaaagaaaaaaaagaaaaccacttgttattcccctatcccttttccagaaccaccgaaccactcctattcttgcatcaaacatataaaaaacaaaaaaaataaaagcaagacagaaagaaaccgaaaaaaaaaacaacattgttgctgatttgttgttgttgtagtcgcataaaacataaaaagtcggaacaaaagtgggtatctactcgacatcatcgaaagtggaatgtgtcgttttgttgcgcatcaagacggcgctcgttgggcgtgcctgtgttgcttgtcgtaaaatcggaaaagttatcgtgagcgaaaaaatcgtattcgactgcaggcgaatcaggacaaggttgcttggtgggaaggccatcttcctaattagtatccctttccagcaccatgtggttccgcccatgtgttctcgcccagtggcgctccgaattcgacaccaccttgacgtttccgcctggtagagggcggcgagctaggctgcatggccaactcggtaccgagaaggttgtcgaaatcaacggcattggtgctttcgaggagctgttgggcgagtgcggcctcgtccagatcttgaaggctcccgagatcaatctcaggcagcctatgggaaggtgatccggtggtgaagttgttggcttcgctcaggagctgggcgaggttcgcggtgaagggtgattcgaagtgctgtgcatcatcgtcatgcacaaaatgtgcctgggtaggggcgtgtcggggacttcgtcgtctgccggaagagctggggggagccagcaggccgtggttggatcccgatcggggagtggtgatcctgcgggcggtcatgtagacatcgatcggcgatttgacaatgcttcgatgggaccgcatcgacctagagacactccttgttatggggcgatgactgggcgtcggccgggttggtgtcctgaacacaccggcggcagtggaactgggaggtggagtggatgggcatcggggaggtgtaccaaacaactcttgatcgagctggtcgccgccgttggctggcgtaccagtgcgcgctggaagagtgttgtggttctccttgcccgatgtagcggacttggccacctgaccgtgagtgactgtttgtgtggcatttgccgaaagctccccaagaacccggggcattgcatccttcctaggtgacgggaagagcagccttcttgtgctgccgagatcatcttcaactgctatggggctgtccgctgttccactacccctcgagtgagttgatcccggcaagcgctgttttggggagctccgcaagtttaaaagcttgtcatcggtcgcgattgtgttgtggctttctggtaacgtcccgttctcagggatgctctcaggaatgttttcttctggtgactcatggtccaatgggccagcagggtccgtcgtgaagtaggcttccgaggtgggattcaccggcccatcgcttttggcccgtgacttcttcttgcccttgccttcgcgcctcttacggctttggttgaggcgggcggcatccttctcccaccggtcaggcgggcggtgatttctgaacttggcaagccatatgccacaagctagccactaggttagtttgattgcgaaaggcctaaagtcgccgagacaaaacttacgattacacaagagggtttcaacccacaccttcttgtcgtccttggtaccaagattcttcttgaccaaccgatacgccgctggctggccctccgcatcccgctcgagaatgtcaatcatggtaacgaaacctggcttatccgaaaactcatagaacggcgggattcccttgtgctcttggatccatatcttacgccaagtaggcgtctcaattgcgccgcagttgttacagaatgggggggattcccctctcatgatggcagactccaaccgctccttgatagtctgtttcttgaccaggttcttgctgtagcgaggcgcgtcaaaatcgctcggcgggcacggggcctcggacatgaatggctgcggcaaagtcaagattggctcgttcccgacatcgctggctgggacggttgggactccagggtcttgcgaggctgggcgcgaaggcggtctagatgttggcggaagaggctgctgctggtggaagcaaggttcgacaacctcgcggctctccatcaccggcagcggcgctgcaggaactgacacctctcgaggcgactgagcaggctcagaggccctggcgaaaccgtttccgacatggttgttgtccaagtccgcggtgggccgcacggaaccgttcatgctcccaggcggctgctcgaaatgtggaggaagagccgattcctgggtcaggccataatgttgggttgtcggttgcgcctgtgctggttgtaccggcgcctcttgctccgaaaccaccgggttcggggcagtatgcgatcgtttcagggaccgggcgtttcgtttctttggcgctggctgattggacgggatggaagctgtcggccgttccacggcttgatgggaagcaggaggtggtgatggccggtgtgtggtaggtgggggtgttggtcggttcaaggtcttaacacgcccagcggggttgaagaggctcttggttgggagcagttctggcgggccagggtttacttcttggaatgtcacctcctgttgctgcgacgcagtacgaactcgactattcttgcggctgttgggtttgctggtcatgggcacaggtacgggctgggcgatctgcatctgcgcaggcatgggtccagaaagctcctgcatccgtggtgggggtaggtccggcatcatatcatcctcgtcgaaaaagtcgtcaagaccgccgctcataaagccggagtcgacattccgcatgggcatcggaggaagaatcggactcgacgctggtggactagaccggaggtagggggtcgtgcgcgggactgggggtgaggagcccaggtcaccaacgctgtcttcgggcgaataaccttggtctggtgattgaccaaatgattcgacgggtgagcgggcgtcctggctcatctcatgcatgggtagttggggctgtctgtgttgaaagacggggatattctccattccaacggactcggaccgagccttgtggcctaccattcttctcctttgctgctgctgcaaaagagccccatcaggtactggtgttggcgcacgagggacatcttgaagatggttaggcgtcggggcgtcgtttcccgaaccaatgggtctcatggtgcgcaacgaccctgaggtactggcagctactctgagtgagtctggtgcagaaccaaacggcacaacggccgcatagtctgcccggataacctttgcccttttcttccgtgggccttcatcaccgtcagtggcttcctctgccgccgacgtgttgccctctgcagtcgatttgcgcggacggcctcgtggtctgccggttggcggtcgttgccttctacttctcgttgaggttcgtgaggacggccgggaaggacgcgcttgtggttgcatctcgactacattttctgtcggctgtggttgaggtgctggtgagggagcgctatggatcggggtgtgcgtcctcggggggtcagggactgtggcgacgccaggaaggccgtgggacgcaggtggcgtcggagccgctggctggggctcaggtggtggtatactcgatggccgattcatatatggaggcgcactatcacttctcatctccatcggccgaggttcatgcatcgggtggctgaagtggtgattatgctgagtgtgctgattaggctgactgtgagggttgtgttgattgtggtgatagccgtgattttggaccggagcaggaggaagcgctggtgatggtacctgggccacattcgaattctgaccaaacatttggctggactgaacaaacgagttccactccgagttgtcgtcgacgtgcatctgagaagagtttgacaggttaaagccctccagggctgaaaaatctggtcgtggtggcgcctttgcaaccattgtcaacttgagtttcacctcgagtgtttcccggctcccgctgctgagaagggcgagcagattgcgggttactcgccctgggaccaattgttgttgtgccgcctcattgttcggatccagcccccgtgatagcatcccttgccctaccaggggcacatcgggttctgaaaagtcatatgcatacacactgtagtcgttctcttcctggttgacgatctcagggctggactgggcgacagcctgaagacatgttcggaggtccaccacgccgattgtggttctttcgtcgagtggaattgtctggatgtggagcaggtgaggccaacgagccaagcagttgacctggctatctcgatcgaaggtatactgcaccttcacttcatgacattagatctgtgtggctgggtcaaggtcagggcatggcaaactcacatcccatcggcctcgtctggacaccgaaatcttcgactccggctggctgggcaaccatgtggtgcgagggcgcctgctgctgccacgagtttgttggagtggccatggtcacatatagatcccacgacaccgcgtcgctcgctctgcaagcaattggcgacaggaataggtgcgggcgccgactcgacagtggtcggctcggggtgtcgggtggtgggaggcgagtttgggtggagagacggaggagaggttcgttaattgagatctcgaagtagggtgggccgaatttgagaggctggtttcattctccagagcgcgtcctggcgaggcgcacccagtcgcgtcggtgggtccaaccgtcaacgacccctgcgctcgaaccgtttgtcttgcagtgaatgccccgccaaacaccagataagcttcaggaagagatggaaactgagagcactttactgggagtgggtgtttgtataggagtatagctgtcgtcgtgggctcggtcaatcgctagttgctttttccaaacggcagggcagttatcaatgctcgcgttcacaactcgaataattgttggcgtagcgtggttgcatccaaacatggggggcacaatgacgcgaagtgggcctttccgtgccttgccttgccttgccttgcgctgccttcgaagcctcgggcagcgcgcgtttgaggtttgaaagggaagcacggtccaccccccatctcctgggcaggcagaacagccagaattgaacacaggccgtctgccgtacccaaatcgatcggactttagcgctcaactccgcggttccaaaggctcccaaccgggcacccgaaaaagatggaaaaccgattaacttttagctgagcttttggcctcgaggggatcccggctgcccttttatactccccgcagctccctcccccgtcaccgcccaccaccgccggccacaaggcagcagccccaccccgatcgaacacacctcacaacacgaacttgacgcctgtttaattgatttcttatcgctgataacacagaccacccatcatgtccccattcccccctttcatcgccgctcaatcgggcaaaacaaaaacacaaaagctgtggcaaccacaaaattccatcctgaactgcaaaaagaaaaaaacccgccgaaaaggcggtaacaccgtgccctcatcatgcaacccttgactatttaggggcaagtgcacacgcatcccggcgtgccagtcccgatggtccgtaggcctgcgtgcatgcgttgtcgtggtgtcgtgtatgacttgactgctatgtggtggccgtggtggctcaaataagactgctcaacgagttggagctactctgtataagttgggaaaatacagggagagcattcggttagagaagagcaacctcatgggtcatttcaatcttctagcaaatgaggtatacactacttcatccccagaacccaccctcaaatcccaagcatcaccactccaaccatcatcccccaaatcacactccctctcaacacctccccaccactaaccacaacccccgtactcccactcccactccccgtccccgtcggcaccatccccccctcattaactcgtcgtcgccatccccgctgaattcaccaccctcctcccccccaaccccctcaacatccccgccgcactcctcagcaccccctcccctagcatcgtcgttggcacactggtgcgatgacgacagcctgaaacggttgttgtcccgttcggcaatgctggagagaatatgcatgaaatttacgaatcaaggaggacggggtttcttccgggggaatttggaaaaacgacaataggataccactaaatctatggatctgaggagagcatagtccatggcaaatgcggcttacacagagcctctaaggtcaccagcttcgagcaccaccatgttgatatgatgaattttggaatctgtaagtgttgagtgtaaaggtgtaaaacaatttaaatacatcttgcacctgtgagtacgtgggcgaatcctacataaaatggtacccaatatctctaacatgacgacgccagcgccgagttgtgaacgaggttaggaacagcagaagattccacaactgtacaatttcagaacgttaaccccgtggcgcacatatccccatgctatcactgtaaagtatcccgcctcttggcgcatagaaccccagtttcgtaatgacagcttctagaaacaggaaaaccatggcatgttaatcataagtcgtgagtcggtaaaagtcgtcagaatttggtataagttgtcgtaaatcggtaaaacggtcgtgaatcagtatatatcatcgtatgtcgtcatgaagcgtcataaaatcataaaataaacaaaaataaaaatatcatcaagactgagatcccctcctcgcaaacaacccccagaatctgcccttttccttgacctcgaccgtatatggcttcagcgggaaaacaggcttgatgttgtactcgtcttcttcttcctcgcttggcgagccagtggtggtgatgtacagggatctgtgacttggctgccatttccgctgaggaatctcaccaagcttagtgctgtcggaggagaaggacatgatggatatccggttgggggatgtcctggggtggagggaggacgaggggctgagtcttggaatcgcggccatggcgaagtgagcatttgcagtgattgcttcgatcgagcttggagaagccggtggtgatggtgcgggttgtaatttgggtgaagatggtagctttggtgaggatggtagctttggtgaggatggtagctttggtgaggatggtagctttggtgaggatggtagctttggtgaggatggaggtttttgcgaactcgctgacttaggtggtgccgttgaacttcttgatgaatgtttttccgcgtgttttactgagcccttcctcggtagctttggtaatgcttttgagttttttggtgaggccggtgttgggtttggcgaggctggtgtcaattttggtgattttggcgttggctctggtgatggcgaagtcaactttggtgacggtgctgctggttgtgggtctttcggagttgcagattttagctcgctgctggacgatctctttgttttgccatccttggtgtccttcttgggctggggcaatgctttcttgcttgaggagctcttttcttgttgggcagactctctcttcggtttgggcgcctcgggcgtcttgggtgacagtttgtgccggtgtgatggtgacgtcgacaaagaacccggagaagttttggatgacttcgacgacgatgacttggatgatgtcttcgaagcctttgatgaagcccttgaagaatgggaggccagtgaagaacgagacgggctaccaagccgtcgggacaggccatctatggtcttgattgtctcaagtctggaagcattggagagacacatgagtgactcatagtccaggtcaagattctgcttgtggctggagattcgcagcaggttcttgatagcttctttgagcttcctcaagacaccgtctactgatgagatggcgcgggctatcactaaggtcagtcatgccacaatgccgagacgaagtggcgacataccatctccttttctgaagcggtttccagactggcgaactcttgacgaataggccttctcaaccaagtcacgatccacctttaaagacacccgcagaacggcttgtttgtcctgagaacagatcgctgtctctggtgttggggtggttgaatttggctcatcgccccgatgcctgaaggccttgagcaaggaaatgcagtttgagtaagtgtccagcaaggcgtggatgctcttgccaaacgccgccatggcgtcaactgagatgttttgatggtggtttgaagatcataagatggtagtacaatgatgtaagttgatgatccaagctctaccagctgggcggcagtataacagtcaaatatggtccctggggtcaaaaatgaggctggaaagcggggctacaccagatataccagcagttggacagcaattttcaggtaccaaacttcgtgtctcttgccctaccgtggatcgggtgttttaactactcctataaccgccgagggaacagaacctgcagcatgcgtcagttgagattcaacgacagccaatcatttgctaacgggggacgggcattcgttagatcaatattcttcagttagtcaacgctttttctttgatttctgcccgtgatagccagttcgattgcctgaacgaaatccattgaggggatgattgggttgaatagatgtcgacctcaattaagcccatggcgctgacggccgcgtagtcagagaggggcaacctacgtggtcgctactaacggtcacctccacagcctcacggaggcggggatgccctgatgggatgccctgatgggatcttatgagagagcgctatcatgtttgctttgatcgcaatgagatagatgttcagtttctactcacccaagaaaacggtgttgagtgttttgagattttcagaaagaagatatcttggcacgccaagaaatgctggttgtgtaatttctcgtgttgcccaaggtaggtacctactgaacagttctcgatcacctagagtttggcgcatatgaattacttttgacgcctgtcaaccaaataccgtaggtacggacgtgtcgggcttcggaattaaaagaggcacgcgtctgcacttacccacgctttccactcgaaggcctcgccaaggcagccatgactgctaccccacgcacaccatgcaggccattgttccaggccggtggcgataacgccatccattactttatctcttcagaacctcgaccccaaatcttccctcctccaggcgcacctctaccctagccgccaactacaaccaaaaatgcgattacaaccactagccctcgcttttagcctcgcgctgcccgtcgatgccgctgctgcttggatcgaaccctcgcaccgggaccaccaagccggccgccttcagcacagcaacggctaccctattctaagatggctgcgtgataccgccgtcgaggccttcttcggcaagcaattgagagatgacgacctcgacacctacgaaatcaacccggctgttgccacgaggcatgagggtggcatcgtagttcggttcaacgcaaccaccttggagcagaagcgcctcctcactgacataacccggacacttcaagctttcgacatctggtccatctcgcacgactatgtcgacgcaagaatatataatgccaagatatatctcaagaagattgtcgaccaactgccagattcgatgaagaagccagaaattatgatttacgatctgcccgccgccatctgggccacgtaccccaagaagacaaccgggggattcagctcgagttccctcgatgtactgacatccagggaaggaatgggtaacctattcttcaaggattatcagaggctgtcggtaagtcttggtgtccgggcgatccccacttgatcaataacactcacactcttcaggtcgtcacaagctggatgcggctgctggaagccatgttcccatcgctcacagagatgacgagcattgggaagtcattcgaggggagggatattcatgccctccgtgtcggcgcacgcagcgaagaggaagaagagggtggttcgaggaaaaccatacttgtcactggaggtctccatggccgtgaatggatatcaaccagcacggttacatatctgatgtggtccatggtcaccgcctacgacaaggacccaatggtcaccaagctgctcgataaattcgacatcatcttcatccctatcctgaaccccgacggctacgaatacacatggcaggaagaccggctttggcgcaaatcgagacaggacaccggtacaagcttttgctttggcatggatcttgaccacgcatttggctatgaatgggccacgaataacaaggcgggcccatgctcagagaactacggaggcgattcccccttccatgccgtggaagcgtcggagctggcaaactgggccaagaatcaaacagctcaacatggagtcaagtttgtgggtttcctcgacatgcactcgtactcgcagcagatcctgttcccttactcttatacctgcgctgctcagccgcccaacctcgaaaacttgatggaacttggtgttggactggcaaaggccatacggctgtcgagcggggaggcatacacagtgacctctgcctgtgagagtgctacggcataccgaggaaaagacgacacccgcgtggaaggcggcggtggctcggctattgattggttctaccatgaaattggagccaaatacagctaccaaatcaagctccgcgatactggtagctacggctttttgctaccggctgaccatatcgtgccaacaggcgaagaagtgctcaatgccctcaagtatttcggggactttctcctcggcaacaatggcattgagaagggggagtttgagggaagtgggcatgtccagaacccgccggccgatcaatggagtgatctgaagaggcggagatagagacttgacgattgcacaggagcggcgttatggatgggtatgggcatcggcatcggcatgggcattggcattttgtatcagtggttttttaggttccttttggcaaagcgtcttgatgtgtatttgcatagcagctacagagtgatacagcgatgcattggataactttatgctttttgttccccacatcacttgcggtcagtccaccgattctagatttagcttttgcgtgtatcggacaaggcgacggagttctcgacgttgggcccaaaaatagaaaattgggaaaatgaagctttctcgtgaagctggtcattgggtatattggatggagtcttgcgaaataagaagctggtagcgcacgaggtggtacccgcctggttccatatcttatcaccggggggtttgaacagctcaccagggagttgtctcatcgtcgtgggcgtgtcgcatgttttttgggggtttgaattggctggatttcttgcataagccgagcatacagctgagcccgagaatagaaaagagagaatcatcatggcatcaaagagctatctccatatgacttgccctgtgaagcttcaagatagggcgaaaataaggtctggatagcttcaggggtgttgcgtgtctgccccgcgatctgcaaattatcattttagagcagggcagggatggtctgcaggtggctgattggctggagggggctacaggtggggaccaagcgctcagcttggaaggagctgagccggcgtcgggttgcgtcgtcttccagagacccgcccagcccaccgcagcccaccgcatcccaccgcagcccaccgaagcccacctcccacgctttctctgggtctcccttttggggcctggcgccgcttttggtgcggtcttggaagcccaggaagcccccagacgctccccccgggacatgctgcccttggcgaaggaacaacccaaacaccgtccttctcatctgcccctagaactcaaccactcagacgttttgttccctattctcattctcactcagctcaatcaatctctccgctgacagaagcgaagccagcacctttccttccttactttcaagctcccacagctctcgttcacagcactttctctaccgcgattgaatgacgacgacgactgacggacccgccgaattacgcttaatttaacgatacggatacccggttgcgattctcatcaccaccccaacaccaaggctcacggcagcgacgtgggcccggcgacgacttcttgcatcacgaatgggaaaactatgacgagcgcacacacgcctacaacccaccatgccgtttttacgacgccgcggcaatgttggcagtgagacggatatgagacggcactcactgtttgacgccctgcccggtgttcccccgttgaaggagccgcccatccgtgccgaatcatcgacctcggacttgcccgccgccctgacgtcggttgcagaagatgctcccgcaccgccctctcctgttcctccctctcctgcctcgcctatctcgcccatggagctgccccgcgatagcatctcggtggcttcgacccacgcccaggaacagcctcgcgcctccgtctcccttgccctgcccgacgactccaacaagcaccggcgcttctccatgctgagattccgtaatgcttccgactcccaactagcagccaaggcgaaattgcacgcggcggccgagaaagctcctcccatgccccgccgtacgtgccattccgttgcattgcgcgagcgctctgccagacaaagtctccatttcaaattgcttacacacaatgagacagctcccgagatcatcaccacggccccgaccaccacgtttgacggaaccgcccctcgaaagaagccatcccgaatgaacttttcaatgcgattacgccgctctggagagatttccaggaccgagctagccgataattcgaacgagagattgggcctgggtacaatgggggacagaagagtgtcacttgttccagaggaaagcagcagtgccgatagcagcgcgaattcgaatgggaagcagagtgtcacttttgacgaaccatctcgggcatccttttctcatgcgccaccggcttatggggatgatcattcatcgacgcttgcactgcctgccaccaggttatcagaatcctcgagatccgatgccagctcaggggacagggtgtatgggagcaccacagtaacaactcaaactatacatactactaccacctttttcaagctggggcggcggaagaaacagacggactctcttttccccattgcccacctacagcccaagaacaagtcttcgatgacgcacaactccaacctctccagctcatcgctatccgtaccgaacagagtcagcacggataggtcgactgccagcaaatcatccctcaatggctcccagctcacgccgactccttctaggacaccatctcggagtggcgggtcagtctcacccagccaaactgtcacattatttggcaaagggaatgcctcaccagcaactgccctgtttcggccgaattcaaggcactctggtcactcttcacctacgagaacttacatccaccggaggggccgttcgtcgaccatgagctccctcggtaacaatacgcctagggagtccgtggaggaacatttgactcttccatcaaggacatccatgtcgaccagccgcaagagctttggtgaccttctcggtcttagcaggttacgacacaataccgattccatatcctcccggcatgggacccttaccccggccacccctgcctcgagcgcatccaagaataactcgctccagatatcgcgtgagtccatcatcctcccggagcgtcgggatgatgatactcccgccagatatctcgagcggttgttggaagttgtcagccgtagtgtggtggcggctgctctctccaagaacaccgagccctttgcacaagccgtgcttcgaagttatatgcgtggatttatgttttttggtgacccaatggacatggctctgagaaaactgctgatggaagccgaacttcctaaggagacgcagcagatcgaccgttttgtccaggcatttgccaaccggtatcacgagtgcaaccccggcatctacgcttcaccagaccaggcctattttattgccttttccctcttgatcctacacaccgatgtcttcaataagaacaacaagcacaagatgcagaaagtggattacctcaaaaacactcgaggagagggcatttatgaggaggtcttggaggtcttttacgacaacatcacatataccccttttattcacgtcgaggatgatttcgacatcaacggagagcggatcgtcccacacaaggtgaagaagaagccgttcttgttgaatgcagcgcccgatccagcgcgacggacgataaaggagcccgtcgatccatacgctgttattctcgagggaaaactggatttgctacggccaaactttagagatgtgatgcacctggaagacccgtacagctacctcggaacggcaaagacgctgaacatgaaggagctccagaagaccttcttcaagaccggtgtcttacagatcgtttcggcaagatcccgacccgatgccttcatgacggaaaagacagcttcgaatccggaggaggcccatcctggtatcgtggatattaaggtcacaaaggtcgggctgttgtggaggaaagatgccaaaaagaagaagacgaggtctccctggcaagagtggggtgccatcctcacaggtgcccagctctacttcttccggaacaccacctgggtcaagtcgctgatgcatcagcaaaaggaccatctccgaaagggctgcgatggggatccctgcatcttcaaaccgccccttgaggccttcaagcccgacgcgctgatgtcaacagacggcgccgtggctttgatggacaagagctataacaaacacaagcacgcattcgtgtatgtcaagaatggcgggcttgaggaggttttgctggcggaagacgaggatgagatgaatgactggctggccaagctcaattatgctgctgcgtttaggacctctggtgtgcgcatgcgaggtgtgataggagggaatatcgatggtcaggggcgcagagcgctcaggagactggatggcgataatgtgcaggtgatccagacaccgaccggagaggtgacggtttcgcgcagccgcattgaccacaagatggcacaggatattttggccgcgcggagggagatcatgatgcagaagattactgatgctgacgagaagctcaaggaagtcgaaaagacacttgccgaccagcaccggaatgcccgacatctttcgcttctgacccctatttcgcaaaagacccgcgactcgttgcttttggcgggtgcgaggattgctgcgcagctgaagtggacgcggatggaaatatggaaactgaagtgtcaccgtgatattctctctttggatttggaagaggagcgccagcttctcgatactcctgcggactcgcagttgcaggtgcctatcactagggaagactcgaggggaagcagccttgcagcccagaagagtcctcggtcgcccgctccgctctccctcaccagaacctcaaccgtcacatcgaaatctgaaggctcatcgccagtcaccgaggtcttccggacgccgccgaccagtgcgacctctacgagcttccttacgcaggaacggacatgggagtcgccggccgcggttcttgatcaaaacgataatcgcaaggcttcggtctcgacggccatctcagtcagctctaccccagctacgccatctcgaaagagggccgagtccagcacgactgttgaaaagcccaagtttgagggaccaggtgaagatgtggatgcggacgagcgtgacctgcttgccaaggctggacttttggaagccgctagctcggagaccaagtcctcgacggctggcgatgagccgtttgatacacccgagaggcgtggccgccactccaacagcacctcggccgatcggctcgaaaagacgaatatccggcgcagtctccagcgcacccttagagagggcgccggtcacctctcgcaccaccgccaccggaagggcaaggattcaacgtccagtgccaccaatgccgacgagggcagccgcgattcaccggatagcttccctcgcagcacgggctcctttgtcgtacacggcaagaaggcttcggtgatcaacttcaacaacgacctccagatccaaggtctgacggctgaagagcgcatccggcaacgaatgcaccgtggcgacgacgcaggcagtgttcggaccggcccgagcgacggcacggactttcaatccatcctcactgctcggtctgtatccgagcgcgaacatcggggatctgccgccagcgcgagcacggccacggcccgaagtttccgggagctgcacaggaagtactcgtcggctcaagcggcccacaagaccattggcagcctcgcgctgccgtctgatgaggatagtgatgcggctatcagcttttctgacggtcggcacacgccccttccgcctattgatggggaggaggaggagaatgccatttcgacgaatgcgctgacgacggcgttggagaatgcggttgtggaggaggaggatgatgacgatgatgatcttcctaccgcgagggaggagaggaacacggtttattttactccgccgccgggcagtccggtgaaggaggaggatgatggggatggggagggaaatgatggggtggtgctgcagaaggatgggggggagaggatggcgagtccaccgccgttgcagtgtgttggtgcttgagatacccctttttttttttcttgtggcttgatacaaacggagagaatacacctaggtacctacctgccttgtttacttattcgaccttacacaatctttcgaacaaccgatcgatctagcctacctacaccaccgctcctttcaacagacactatttttccttttttctgctcgggggaaaaaagcattgcctaggtaccctacgatggcttctttctgtggtttaatatttttttcgtttcgatacgctttttttactttgagtatagcacttgtataatgtacagcaaacacggctttttttccttttcggttgtattttcatggcaggcatgagggaagatggagaagggcggggggggggggggggctctaagataacaaatgatggcgtgtgtgtgagtgagtggaaagagagtgtgtgtaaaaagattgttgggaatggttttctttttgcaggtttctgtcttgggggttgtggaggttgccaatggctctcttggtttttttttttttgggttggtggtggtggtggtggtggtgtttgaggagttttgggggtttgtggtttggaggagcttgcattgctgtctaccgtttacctagtttaacaacataaaagaagcgttgtttaggcggagggggggatgaaataaaaaaatttatttgatatgagttttgtactgtggtgtttattggtggtgatttggtggtggtttgttctgtatgttaatatcagaccgcggatgaatccattgcgatggactgtgacgagttagaaaagaagattgttgcgggttttgtatattttggtgacgggctgattgtggtttaggggaatgtgctctctatggtggtgttgttcaatgtaggtcagcaggcgaggagcattgaaggttcgggtacttcgtatacaagatggacttcttgtgcatagagagtctgggcggggagagatgtatgttattgttggagagtgatgggaaggagtgatatgtagaagatacacagagggcaacaagttgatttctatatttctattcacgacagctatcgcaacacgccagggtttgtttacttgattacacttcaggggtaatcattcaggggcggctgccaaacgagcatatttctattatcgattagatacacgtcgtcaaggtactcatctttttcctattgctaggattgataaaagggtctacattatccaagttcatgctcagcctgccctgaaaaaaaacatcaagaccaccgtaatattctttggaatttataagaggtcacacaacaaacatgttcaacagtttcgtctcgagtcacagcagccatcggacagtaatcatgaagtgtaaaaatcatcgcttattcaatccctaccttactccccaacctaacctatccccattgctgtctaatgttttccactccaagagcctcatacaatacatcttacaacccccctgccatcctcactacccccccccctaaaatcatagctcctcatgctcgctcatgtgtgcgtgtgtgtgtgtgtcctcgaagccaaaactttgctcatgattccatgtcttcctcaaacacatacaactatccattccacttcatgcccaccatatcaaaacccctcccccttctcccaaaataaacccccttttcgtcaattcaatggcgatacaaaacgcccaacatatgcaaaccctgatatcacaaaccccccccttccccccgccattttcaacaaaacctctatcaaaagacatgcatgcccaaccaagccaacttcgataacagctaccctcctcccccatgtcaataattcctcgcagccaactgctcactcaaccccttcaacctctcaatcgaaccccccccttcccccccctccccattcactcccgccgccttgatatgcagcgcaataaactcattgaccgaatccagcagcggctgcaagctcttcttggggtgcaccctcacaaacctttccttgatcggctcgtgcagacacagataccccaatagtatgctcaaataccccagcgccacattcaactgcgtcttctccatcgagtcggcctacatccctcattgttagcaaccttgtcagtccctgtaacaaaaaaacaaaacttacatccgccatcttcaaatgattatcagcaaaaaccccaatcaacccctccaaccctccctccccagccagcgtctcacccgcaggcgggtagtaaacacagaaattaatcatcacccccagcatgataatcagcccatccagcagcccccgtcccctaaaccccccctcctccttcaccttcacctccaccttcatcaccatcccaaacgcgccccacgcccccctcgccaacctccccagcagccccctctcgacaaacaaccggcacgcgtcagggttgtgattcgtgacgttaatcgacgtcctcagcaccaacccctccagctcgtcgccaaacccctccaccggcctgctcagcgccccgtccagcaagtccgccacgatcggcgcgtatttcctcgtccacctcgcactgagacgggaagactgcatcgcgtcgagagagagcccttctactacgtggagagagagcgcaaaatcccacgagtttgcgtggccaggaaaaccccagctgtccgggttagacgtcccgtccttaaggtaaccgaataaaagatcagtgatagcaggcgaaaaaaactcatcctccgacacccgcgtcgactgcctaagcaaaagctccagacacttcagcgccagtgtccgcggcgacaacgagcccggcggcgctggtttccacgccggaagctcaagaacagaagctttcaccgtccccaaagtagtttgcatatttttcgaaacgttgtgcttcctgtccctcaccagccgactgatatcttcttcctgatcaagcagccgcttgagaagtgcagcaaaaccctgcgatcgtaactgctgaataagatgcgccgaaggcgacgccgccaaaagtgtagcgacgatggccaggatagaatacccacacacaaggtcagtctcctcccccagcgaccggaacagagcctcatccccgctgtgatcccgaaactggcgccgaaactccttggtcttcatcttctgcgccagctccagcaacgcgcctttgcgcaaagatgaagcctttggtgacggaacgccgatgcgatcaacgatatcacccatctcatcagcaaatcgactatttgcacctgcctgtcgcaattcgtggatactctgaacagcgccgctgttccccaactcttcttcttcgtcgaggtaagcaaacttgctgagggcggcgcttttggtgagccgcccaatgttgaataatgcgcccttggacgacatgtcgtccagaccaccgcccaaaccgccgctgccaaacaacgggtcctcttccgccagcatggacctctgctggctgtaggtaaacttgggtcccgacttcctggctgtcaataccggacgcgccatagttcttcccttgtctgcgggttctggactagagtcccgcagggctggagaacgtctggttttggagatgtgtgagtcttgcgacgagaatgcgtcctcttctgattcactttcttcatctgcctgttcgaccagggtgtcaattaaccgcctcttcttcggagcctttcctggctgactttgggggatcggttcgggtgctgaggtgggcagagatgtaggttcaatttcgatcggaggcagaggcttcgaggaggatgatcgtggaccggaaaggcgtattggaatctgcgtcttctcgggctcgggcttcttggaggatttattttttgtaccaacgcttaggttcttcaagatcttggtggtcttcactgagaagagaggcgcagcgggcggtggggcatcctgcatatggacatctcgctcaggtgtctgtcgagatctggggaccaccgaggatctatctttcgggtccgatcgccgagtgacaggttcaggagagggtgccttttcaggggataattctggtgttgagtagggaagcgaggtcttgctcgtcctttctgactgcacacgagctagcctcctcttcttgggccgagtgtcctcttcaggttcatcttcaatggcgtagatatcgtaaggatcaggtaggggctgactgtgagagacatcggaaggtttcgaagatgcgtcacggccagctttacgtatgttttgtaatttccccttgctggaaacgagggtgcgggaggcagaggcagaggcaggcgcaggcgaaggctcaggtgaggtcatgggtgacttgttgagagaggacacgctgggaacgatgggcgcagactcggcatgcctgagggtgccaacggcggaagctttgggtcttcttcgtgcaagtttgccataagtggtgacctttttctggggcgcatagccaaagtcggtctcactggtgctggccatagtgaaggacgctagagaaggaggcgtcgctggaggctgcggttcaaaaaaagaaaaagaaaaatgaaagtgatgccgggaaaatcaaaagtgtcagtgggacattccaagttggtcttgcgatgcggtgtcaatgccgctgggcgagagagctcagaggctgtgtgaactgtttgggttcggtccgcgtcctgacaatgaactcaatgcgaccagccccaagactcaactgccacggtgtgtgcgaagactgagattttcaaacaaagacaactgctcctgggtgacgtagatagtggccggctgtgatttggccgggagcaaaagccgttgagagtggaaaattgggagatgggataactgcaattgctcatgggcagcagcagacgcgttcacgacttggttgttcatgaggcttcattgtttttggaaacaagcaccaaccccacatcttgtctcttgaactcccagtctccccgttgccggccccagcgccaccctgcatggtagcccgtgcccccctttcttggcacccagcctttcaaaggaaggttgagacctctccagctctcttgcgcctccatcaacatggaggggatctttcgtctcaattctcgggaaaattggcctaattttgtgcctgaaagaatctgtagcactagcttcgcaaacaaagaaccaggtttcaggattttatttagattactgagaatgaggacatgaagcaagagcaagtgaccatcaagtccaagtctacatatcatatcgttcatcttatcttatccaagcatagcccctccaagcacatggtaggattctcaaccccgcagttatctctgtcaagaaaagaccccgaaccaaaagagcacacaacaaactccaatgtctcaaccctccacagctatccatgactaaaagctctttgcagctatcactgtcatgtggcgtccacctgcttgatcaaccctatccacgttgtcttccaacggtcaggtggggtctggagacaactgcagccaggggttttctgccatctggtgtcatggtataggaagaagcttgccttgagagaggggcaaaaaaccgttcgtagttccaatccaccgagtatttaggattaaggttacctaccttaaatcctcgtgtgctcagcttcccaatccataagctccgggtcccctttgtccacacacacacacgcacacacagagagagagagagagagagagagagagagagagagagagagagagagagagagacacgatcccaattaacctcatccgtctgatacaagggcccctcgctttccctctcctcctcctcggaagcaccttacatttcaagggtgattcccggcatatcctacctgcaaaatacttttgctcagggtggagttcaccttatctccgcacacctgtttactatcgaactctactcaacttactttcccgttctcataatcccttattgtagccatacgcgtttttcactctaaacatcaccacctacctcccatatacctcaatcccacacactcaatgaccgaagaagtcgcccccgtcaagtgcgtcggccccgaataccgcgccgaagaccaaaagcccaccgccaccgtctcaaccgtcgtccactttgacaatgtcaccgtcctcccccaaaccccccagctaatcgccctcctctcgtgagccgttcccttcttccctcccctataaccaatttgtttctaaaaaccccagcatcatccgcaaccactccaccgcccgcggcgacttcgtcttctactccaaccgcatcatccgcctcctcgtcgaggaaggcctcaaccacctccccaccatctcccacaccgtcaccacccccgtcggccgcccctacgatgggctctccttccagggaaaaatcgccggcgtctccatcatgcgcgccggcgaggccatggagcaagggctccgcgactgctgccgctcggtgaggatcggcaagatcctgatccagcgtgacgaggagactgcccagccgaagctgttttatgacaagctgcccgaggatattgcggatagatgggtgctgttgttggatcctatgcttgctactggtgagtttttttcatgtcaagtgtcagaaaggtggggggggttgctgatcagaaatataggcggttctgccatcatggctgtggatgttctcaagtcgcgtggggttcctgaggagaggattctattcttgaacgtgcttgctagcccggaggggatcaagaactttgcggaaaagttccctgcgtcgagggtggtgactgcttttgtggatgaggggttggatgagaagaagtaagtttatttccttttcggattttcagatatgggtgagtaagagctaaccctatgacaccctaacagctacatcatcccaggccttggtgactttggcgacagatattatacccggtgaagaactcaatgtagcaaaaaatcgccaacaaataaaacacgctcacacaaaaaaaaagccgatatatacgaggccaaagcaaatcattatctttttgcttgtcttgaaaaggaaaagcatcgtagatattaatattttccacacccgccgactaattttatgcctcctctgcctcaaatacttgtcgccatgatatgattgattgatcgattgattgccaccccaaccatacatttatttccctgtttcccaattcccattcccccccccccccaaaaaaaaaaaaaaaaaaagaccaccaaatcttgtcgtagcaaaacaaacaaaacccaggaagagagatttcactcgtagtcatcatcatccggtatcacatccccataaccatcctcgtcgtcatcggcctcgactcgtcgggctgcccgccccccgctattacttgatcgcccgccggcgccggcggcctttgccttctcgctgttttcttgggcgacggcgtcggctgcgtcgacccattcggcgtagacgtcgacgggggcggagaggtagttgatgccgcactggaagtgctggccgcagatcttgcagtcgagggagccgacgccggctttcttgtcgaccttgacggagacggccttttcgtggttgcagaagaggcaggtgaagactgaggggaggggttcgttctataaggggggggggggggtttgttaggtatcatgcgcaaggttggattagagagagatggatgcgtaccctgcgagggccggttggctttctggtggcctttttgcgcttgcccattgtttctggtggttatccgggggtcgaagagggaggtaggttgcgcgattgaattgatggtttcgctgggtttgtgcgaggatgcgccgggggttttatgggtgtgttatttggagagagtttgatgcagaaaaggtgatgtgataaggggatatatggattgatttggattctcaacaggattcggtcatcgcctaacaatcaagctccatgttctcatgcgctggagacgcgtcggattaaattgccccgctaatctcaaagtggagcgtgctgctacatgcgagttacggtgtgcggtgaagtgaagtaaggtgtggcgaggtgaaagaagaaggttcaaggtgaaggcttcactttgacaaggctcccttgatctccaccgggtttgccaagcggggccaagaagggtcggacttctaatctgtggcccgtgccctcgataaacctccgcggttgtcgggtccacaccacccgtctcggcgagaggggagctcttgaccttcctctaacttggagtgatcatcgaccttgcagtgttcgtcccaggatgctgttgtgaagcatgttgtgaagaggttatgcttctcttatctaatccaacagaagctgtctgtctcaccaacagaagccaacaagacaccggtctccttcccctcgccgtcagctgaccttcctgtggctttacctcccgttcccgttatcggttctctatcatctccagagacgtgtccgccttccaaacccagttccgtgatatccacagcggcagacgatccgattgcggtgccccgcctccgccggcctcccggagtggagcaagacgtggaagcacaagcacaacgacagcgattacaggggtcgacgcaagcactaccggaacgccaacacacggccagccagcttgcactattatcgatcacctgccattctccccgaccgcccggtgataccagcttctgggggtcgaagcggcccaagccccgtccaatgacgccggtttcttatcacggggtctcacccgagctccggaacctgccacattccgatgtgtttgtctcattaccaaccgttttatatactagaatactagttgcccgcaccgggtttcacttgactactcagtgttctctgtctcctgtctgtctaggggcttgtgtgtttcgtgaccaaaccgctacagaaccctacctatcttttttgatcccgaagatctcgctccctccaccagagctttgttgtttttttgtgtcccgttccatcctcggcttctagattggtagcactttgcctcagctgtagtagctccatctccctacctacgttccgcaaaactactttcacgatgggctcaacatcaacaaacatggacgacctaaaggaagccctccagtccatctcccaaacccaaaccgccctcctcaccgccgtccaatccatcgccgaccgagtcaacaccctcgagaagaaagacacttcctcttcttccccgccctccgcccaagccctcgaccggtccgcaacccccttaagaacaggcttcacccaaaccccaaccagcgaactccccgccgaagcaggcacccaaacccccaccgccaccgcccctacctccccggtggccaccgcctcgaagcaattcacctcgcgtgtaatcctcacaaccgtacgttcccccccctttcccccctctaaccacttcccttaactaacaagaaaccaaaaaagtacccccaccaaatcggcatctcccccctccccctcaactggggcgctcccgaccccctgtcccgaggcccagtaacagtctcccgctccccctccaccatcggccgccgaaacgcaatcggcgcccacggaggctcctactccatctactacgcgctcgccctcgcctcgggcgagctcccccacaaccacaagcccgattacaccaacaccgaacccgccgtgtccatcggaccgttcccccagtggggcgacaagaagaagattgtggctatggatccgtgggggcatttagtgccctggacgcacaagggattgatggaaagggaaggtgttgacctgcggcctacgattgcggttacaaaggcgcatatgacgcttccggagctggaggagagcgtaaggagtgggaggttgaggccggatggcaaggtttgtttgaatggacggggggagttggctgtgaccaagtttgcggtggagccggtttggtacttgccgggggttgcggagaggtttgggattgaggagggggtgttgaggaggagtttgtttgaggagacgggggggatgtatcctgaggtatgtgaaaagaggggagtaaaaaggggcgagaaaagctgacaaaaggggggggtggggttgggaagttgatcactaggtcggatatcaaggtgtttttgccgcctattggtgagttttgctccaacggagagagatggtgggacaagtactgacaggtgacggttgctggtttacaggtggcttgacggtgtatgtctttggcgacccggcgaatatgtctgacccgtccaagaggttggctttgcggatccatgacgaggtatgacaatcacaaaacaacccaacccaaccggctaaccacggccggtcatcagttgttgttgttgttgttgtcattatgatatttgtcattgccgtgctgacaccccgcccccctcatctcacagtgcaatggcagcgacgtcttcggctccgacatttgcacctgcaggccctacctgatctttggcatcgaggaagccgtcaaggaggcacagaatggtggcagtggtgtggtgatttactttcgcaaggagggcagagcgctgggtgaggttacaaaggtatgtcatgttgcaaaaaaaaaaaaaacttcattttttctctccgatgtcgttttgttttgttaccgttcaacaagaaagggggggtttaaagctgacatggaacggaaatgtagtaccgtaagttttgcatctttcccagtgaaatcctgctttggtggtgtaccggttgcctcctttctcggagagaagatcctctttgtgtcagtgagagagtgtattggtctaacctgatctgcaaatgccggtagtggtgtacaacgcgcgcaaacgcggggaggatcgggcatcagattacttcaagaggacggagaacattgctggtgtgaaggacatgcggttccaggcgttgatgccggatattctgcactggcttgggatcaccaagattgacaggatgctcagcatgagcaagtgagtctccctttccccccttttccctcacgtttgccgagatcctgggggaagaatggaaggttgatatgaattcttttcgatttgcagcatgaaacacgatgcgattgttggtcaagggtgagttttacagagttctttttctttttctctctctttccatgggattcacttggacacaaagaatgtctgaggttatcggaaaaatcggacactccgggaatctggtgactggttgctaatcgtgagatcgtgatcttgtgtattttagtatacctattcatgaacgggttgagcttcctgaagagttgatcccggccgattcgagggttgagattgatgcgaagattactgctggtataagacattccctatcatcatctggtgttgctgtgggacagtaacgtagtgttgtgtgtgtgtgtgtgtgtgtggcccggcagaaagctaacttgctggttagggtatttcacgacaggtcaccgaatgactgatgacgagctaaaggctgttcaaggccggatatgggaagagtaagtcgcgaatgacattccccgggccgtttgtcgctgtgagaggtgtggctgacacaaagatacaacagtattgaccactagaagaaaaagagcaatgcggttcgcccgcctcttcttggttttgggaaggaagcttgggggagatgttccaatgtcagacagaaaagagccttttgggaaaagatcacgctagaacatgtacctcgatttttacttgaggttgcgcggggggggggaggagatggaatatgagtaatgtgatttgttgaaccaataccgtttgagtcttgaggcacgagggcttgggttttagtgtttttgtccaaaagagagagccgtttgtgctcaagttaggctgcttctcggtctgatgtttgtttattagtagtgcgtaagatatcgcaacattatcctccaaccagaaaaatcacgctgtttttttagataacgcccccacgaggaggaaattaggaagagcaaataggaagatggggtgaagaaaagaaaagatgtcaaaatttttggactgtcacgcggacggtggtgaggtctgtacgacgaatgagtttggtgatctacatgcctacaaccataggagagggaaaagggcgcgacaatgggatgtcgcgtcaccgagcatgaacaagcattcgatttctcagcttgttattgttgttgttgttgttgttgttgttgttgttgtaagctgttggtgtctggaatcttgatgatttgcgaggaacacagattcggatcttgctcttgtgtgcgtgtgtgcgtgtgtgtgtgtgtgtacacagtatgtacacaaagtattactgctactactacaacagaatagacatgggtattcttccaagacttttagtctatgcgttgctcatccgcaattcccgtttggtacctggactagagttttccgttccggcagcggggagaggcacgtaaccgtgccgaagtgcggtcagggggggatgggaaggaaccggattcttggttcaccttattttccttgctttggaccatgttcgttttctgtcatccggctcggttacgggatgtgttgcgtgttggtttctgtatcacccctgtctagttatacatcatcatgattgccatgatacaatttttcccccgggagtttttgtaggctgatggtgacacgatgactgcacaccggtccggggtttggagttaatggggataggccaaggacagctggctggcaggatgaggaagcagagcccgtgaaatgttgtttgtctggtgactctcttgcggcgcagcaagggatgcttttccctcttccccggggatccaattgccaatgacgaaagatgagaggcgtagaattgggcttggttattggactgattatgggctgttggagatcatcttggattggaccatgtcatcggccctcgaccccttgtcagacattattggcttatggcagacataaacccccaagaagtggaaaatcgcgcagttgtccttgttggggggttttgctgttgaatgtcttgctcttttctcatcccatgggggacggagtagggggtgcagatatggtcttcttctagtgttggtgtttgatgcgggaaagagagggcttccccacgtctttgctgcaccgcaccgccgtcgggtcgccgggtcccctgtgcaaagtcaacgtgggagaggccagaaatgccgtgcgatgcgggcgggtaacgtaccttggaagaatcaattcgcaaattcaatgatatcaaatccgtacttgttgtccgagatgcccgcggtgctgtgtgctgtgtgttgtgtgctgcaggagactgtccagatgaccatcagcacaaagagcgagattccaggttgcccgtttgcaattccctatctctctcgccagttgcggtcgattgtgtggcactctacagccaaaaggtgcggttgcgttgcagcaccggtaagggcgattggaggggcaactactatacgaacaggaaggcgattgtaacgattgagagagatctcgactgtcacgagagcaccagtgagaaggacagactgctagctgcctaccggtctggtttgggcttgcagatggtggtagtgtggtgtggggtcatggtgatggtggactgactactggatgactgactccttggtgttgttgctcaaatgtgtgtatcaaagttgatgctgacaggtgtagctccaactcggcgcctttcactgaagcatcaacggaacggcgtccggccatcttaagacactggctgtactaccgtggctatgtctctgtagctcttttgctctgttgccatgttgctctgttgccatgttgctctgtgtgccgagtaaatctccttccatctcgatgatcgctctgaaggtgtgttcgtatacccttgagtgcctcgtgctcgtcgtgcctgggcgtccggtgtctaggctggaatcggctccaacaaaaagtctctgatggctcggctttgttattctgggtcgctggagctggcatcaccaatggccgtcaaacaccatgcagcacctgcagagtgcagcttcagcgttgttgaagtgtcacgacttgagtggctatcggtgctttccgcaccccaccttggtcttgttctgggagcctgacgggggtgccatggggtgccattcgacaggcttggcatcttggagcactctatccacacgcaccggtctgcaggctataaccgcacttggttcgtgatgttgagtcggaggatggtaggatgcccaattgtgcgtgcttgatatctgtccaatgtctgtctggcaacggcccgcgcccgtcagatattgactctctctctaggtagagtgtgggttgtgtcggggggtgagctgtccacagttgcgggttgcagtctggcagttctgcagttattgcacacacgccgaaggccgggagtccgaacgggtagtgagtgtgagtgaatctgatcaatgttgactggtgggacggatgagtgatgggtgggtggtcaacccatcgatggcctgggccagccatccgagaaaccaagcccagccaggcaccgtcacactccgcgcttcgccttggtgccttggtcgaactcgactaagccaacccgtaacccgcccctccttgccatgccaacctgtcccaagtcacccatggactgacaagtggcaatgtagcccgaaagtgccgtcattgaaacctggagacattttgcggcattgagcggatcgcatttcagcccaagtgggcggctcccataaactcttctggagcactggagcacctccactcccacgataataataggccccccttcccaaccttttcctccactttccaacttttgattctcagcctcagctaaatatcaatgtgaacctccaccctcgactcgacctttaacaactccaaagtcaagtcaagccaagccaaaggatcaacaaccaacaccgaagatcaagcatcaagatcaacatcgacatcaacatccaccttagtcatcatgatggcctcactcacactcacacccgactctcgcatgcagcgaagagattcatcagaccgaagcgccagcaagagaagaccaagactgctccgcgccactgctaccgaaccctccatcaccacctccaacgccagccgaaatgccctctgcagccagtcaaaccgagcgaccgacctcctgacccgtgccttcgtttctggctctcctccgggatcttcttcaccaatctctgtccggccatccatgttcgacagtgtcgaccgtcagcaagagctatccgtctcgcctgtcagtcagcccgactcgtatgatgagcgtccttgtatgtcttgccatctttcacttgtgtcccggactatgtgctgactttgaaacccagtctcgggacggtacttcagcttccccagcttcgatgactatgagggtagccagcaagacgacaaggagtccgagatcaagtccccttgagaggtcgccctgatctcttttggagggcagttccgctgaatgctgccacgcatctggctactatgcctttggagcggaacttcgccaggagaaaccggaacccctaacccaacccatcatcgaaacgcccacgccctacttcccctcggattgagaagcacttgcagccatgactgtttattttgtgtattccccgagccagtccacccctctcacacgcctcagattgaggcactcccgacgacgggatggagagggagtttccactggagggtcgacggcgcagagagcattttgtacgatacaacactcattttggtgacgtgggatcacgatatgatcccccaaacgaaaggtcgacagcgtcccacagatgggatgcacgtctcaaacggtcggagtcattcaccccgccaacaaagacgttgaaaagaggaaatagggtaacacacccacctacctatgcgcactcaccgcccttgtaccaaaacattttgtgtagctttatgtcgtcatgacacgtcgggtgaccctgagcctatatgctgccagggtaaacgcaccccaaggaggatgaatagatggatggatggatggggattaattggaagggaaggtgatcattggccggaaaaaaggtcgatggaatgaatttacgtcgctctcttcaaaacttttcgttttgctgaatctttgggaggctgtcactgagatcttgatttcgagggggacaagcgggagaatgatcaaaaataatctagtcataagacacaaaaaaaataaaaatcaaagacactattacaatagccagtgctcccctttgactagtgtgatgtgagaccgaaaagtgtggtgttatgggcatagtgcaacaccgatagttgtgacttcaagggaaatagtacgcgagagcatgtttgaggctgtggtaatcaaaggcaaaggtgatggggaggggttggagctgggagtaagtggtgcttatcttatcgcccagcactcaccttatcgatagcagagcagcaagccaaaagtgaatggcaggagcaggcaaaaacgcacggccctccgagccctaaggtccgtgcagccaatcatgccccgcagtgagtgccccacaggtctagtttttccgctgatgggaggtgcgctgcagcccacacaacgaatttcaattttgattccgaagcagagaaacccaaactcgtgtcctcgattgcacggtctccatcactaaccaagcagcacttcccgtcaccgaagacattgctgcgtcaagatggctgttggcaagtacgttgaacccctcgaaaaccgattttctctgcgatacccacgatgttcctcgacttcgcgatacaattcggccgcctggtggtggattctggacttgatgatggctgaccatcgtccacaggaacaagagactgtctaagggcaagaagggccttaagaagaaggcccaggaccccttcgcccgcaaggactggtacggcatcaaggtacgtcgcgacataatcgagtttcggtcgaggcagcgaggctaacaaataatcaaatcacaggcccccgcgcctttcgccatcagagagtaagctttgaaatcccgaacaccacagatcgccgcgagacgagcaggcaggaacccgagcagcgattctaacaagcgatttcagcgtcggcaagaccctcgtcaacagaaccactggtctcaagaatgccaacgatgctctgaagggccgcatcgtcgaggtttccctggccgatctccagaaggatgaggaccacgctttccgcaaggtcaagctccgcgtcgatgaggtccagggcaagaactgcctcaccaacttccacggccttgacttcacctccgacaagctccgctcgctcgtccgcaagtggcagactctgatcgaggccaacgtcaccgtccagaccaccgaccactacctcctccgcctcttcgccatcgctttcaccaagcgccgccccaaccagatcaagaagaccacctatgccgcttcttcccaaatccgtgctatccgcaagaagatgaccgagatcatccagcgcgaggcttccagctgcaccctccagcagctcacctcgaagcttatccccgaggttatcggccgcgagatcgagaaggccacccagggcatctaccctctccagaacgtatgtggaattttgagcgacggggaacagaagcacggcggggtagctaacatgtcactttcaggtccacatccgcaaggtcaagctcctcaaggctcccaagttcgacctcggtgccctcatggctctccacggcgagtccagcaccgatgatgctggccagaaggttgagcgcgagttcaaggagacggtccttgagtccgtataaagggttggttgtttttgggaacgcaaagggcaggttttcatcagcaatacctctggggcactgggattgctttcgttgcatttggcgcgtattatggaacagtagtcaagggtaacgaatgttggtcccatacgacggaccgagcgggaatcaaaaggatcataaatgactgtgacacgaccaaacaaagcatttcccccagagatggcacaccccccgatgtgaggttgtcactatggactgcctagggagaatggcctgtgaaattggcccgtctcggtgacaaggcaattcgagggggacgtggcagaagtggtagtgcgcccagataccgtatcagcgaacatgagtttgacgtgtgctcctaggaccgtttcctgacatttttccccaaacgacgccgtccttttgttcctggagtaaatcgtacgaagtagtcccattgtgttgaaattggagcgcgtgatagggcagcccagcttgacagcttgtttcataacgtcatcacgggtgctgtccaagcccgccagctactttattagtggccaacagcaggcggggactactaaagttcactggccgcctcactaccagttgggcaacaagacatattcttccagatatcacttttcttgtgtttccgtctgtgttgctgccttgcttattacctacctatccgagccgcatcctctttttttggtcttttgaggcgagcgctagggaacttccacattccaatcagtttttaagccgctgccgaaagataagacgagaaagaagaaccgctcagaagggagggtgtcgtcgtcatcattgagcagcaccacccagtctttgtgttttggaccgaggcaaaacccgatcgattctgtcaacccgcccaaaaccttaaactcgcatcattcgagacacaactacctttcttatcttttacgcacctacctacctaccttacttgcactattcttaccggacttttattgttgttgtttgttgttgctgtggtttttttttctggctggcgggaataacaaaaacagcggcggatagtttgggttggttggttgatatatctcttgtttggcagctactgcaagggaaaaacttggggatttaactgaaagggaaagatggcttcggatgataccctcccgacgctcaaggtgttgcttattgggccgtcgggggcggggaagagtgcttgtgagtttttttttctttcttcttcatgtttatgttgtgagagttgttgtcacatgttttttttctgttctggtggtgaggtggtcacccgtatatgaccggtcggtggcctcaacgggtcgtgatcaacccctggcttcgcatgatatggcctgggatgtttcttcatggcttggaagtgatgatcccttcatcactccctcatcttcacaacactcacaactaccacctcacagcttgatctcactaacactcactcacccactcttactcagtactaacccgctactgcgatgatgaattcgaccccgagacctcggccgcaacgatagggattgatttcaaggtattcccttccccccttttcctccttacccgtcactgacaacccctcccccccccccccctagatcaaagtcctcaacgtccgcggcaaaccctaccgtctcaccctcttcgacaccgcaggccaggaacggttccgcaccctctccacctcgttctaccgcggcgcgcacggggtgttgctcgtgtacgacatctcgacgcgggcgagctttttgagcatggagaagtggttcaacgaggcggaggcgaacacggtggagggggttgcgctttatctggtaagcccccccgcccccttacatcacatcacatgtaccttcaacttttccaccgctatgttgtggctaacataagaataggtcggggcaaagttggacaaggccaacgcaagggaggtcaccacggaggaggggcaggcgctcgccgaggcgcacggggcaaagttttgcgaggcgagcgcaaagactagggagaatgtgaggttggcgtttgtggatattgtggataggattgtgcagactccggggttgatacagaatgctagactgggaagggcggcgggggcggtggcgttggggaatggtgggagtagtgggagtggtggtggtgatgggtatggggcttatttgtcggggggttgttcttgttgagcaagggggttagaggggaaaagggcgttgatcatggagaggtttggagtttgagggttggttcggtaaattagaagagagcgaggcatggcgatggatggatgggtggtgaggggagttgggatacacttcagactgttgagacagcacagagagttttgatacccccaggcttttttggattatggatggaagtacattgtacaccttttcttttgcttatcaagtgtccttgtgttgaagtacttgttgtgtttggtctataatttctgtctatgtctaagtggtgtgtgctgttgacgcatactcctccccctctcatgcaatattggcatttgatagacgatggacaataaatatacaaattaacctctctccggccatctattccttcggactcaaaaactccaccaccgccctcctaaacgcctcgggattcaccctaatcaaccaatggcccgcctcgacatccaccagtaatcaaccaatggcccgcctcgacatccaccagttcaaactggggaaaaaattggcctttcagcgggatgatttcgtcagggacatatttcgactttgtccccctgacaaacagcgccggtttctcaaacctgacctctctgggatctttaaagggaaagtcacccaggtgatcgagcgccttcccgatgatgctcagcggaaccttgaacttttggacctgagactcggggtggcggggacggtggaggttgccgaggaggaactggcggattgtgacggagggttcgtaggactggaggatggagtctgcttgggattgtttggtgacctcggaggattcgatctctttcatgccgcggatgtagcgggcaaagtcggactcgaggcgggcgtcgatgggggcgttgtcgacggagatgagggaggagattagggtgggggaggtgagagagagggtcattgctgctttggcgcccctgagaggagaaggggttagtaagataatgggggaaggaggggggagggggacaaacatggagtggccgatcaggcaagggtctttgaggtcgtgctgcttgataaagtcgcctacgtcggcggccatggcggtgtagttgtggtgggggtcgtggggggagtccccgtggttgcggaggtccttttttggtgtcagcgatggttgttgatatggggtttaggtgcaggtacaatggcgtagacggagcggcctaggtcacgggcgaggactcttgtcatattgttagtatgataggtaggtgagtaagagagggagagagggagatacgtacttacttatcgttctgttattcttcttcgacccaaacaacccgtgcatgaaaacaataggcgagttcttgttggggttaccaaccgacggcttggccggctcgtgaagatcatacgccagagggacggtggaatatctcatcttcatcgtttggcataatgaaggtgtaagcgtccttttggcaacgagccgaagggctgtcgctcttggagccatcgtaatctttttctctttttcttcttcgtgagttgaatgagtgtcggttatatcgcaggtaaagagtgaaaaatgcagggacctgaaccctgattatgtacaatgttgagatatgcacggtgagttcccgccaaagtgacagcgagagttccggtgaagctccatacagacaaaattccactctgtgaagcgcacgggccacatacgtcatcttatcggttcgtgtaagtggtagatagggtgtaggggaagggaacaatatcttattgctatgtagagattggctcccgatatgttactttagagttcgaatagctacaactcagacttgagcactctccggagggcccatcaaactcgacttcaacccacccacgtcaatcaccaccttggtaatcaccatggtcggctccagaagccagaccttcaactcgtgcttcccagggttcaatctaccgatattgttcgtcttgacataggaccccttcaccacggcgtctgaccatccttggggttgagtgctcccgtctgtcattcccacagtttgaactgtcgtctggctgccgccgtcaatgccaaaggtatacttgtttgggctgttgggattcgcgttctcagatggggcaaggtatactgtcaacgtcgcagcagtagcagtgctgaaggtgtaaaaggggtaagaaaggacatgtcccttgcctgcttgttgcgaaggagtcttgggcgggagcttaacgcctgagagggtacggccgtaatcggggatgacgaggtaagccgatgatgatgcgggcggaggggcaaagtgctcggcttcgatagacacgacattgttggcttcgacgtggcctttgaagtcatctggcacattgttgttctggatgggcaggataactgtggccattgtgccggtggcgttgagattcgcgatgctcaaagaagctgcagtgtttccaactggggcctttgaccaatcgaccgagatgagggaacgaatgtccgttgttcccgaggtcgtcgagatggtattctgagcgtttgtcacactgacaaaagaagcgttggatgtgatccggtagctgaacgtcccgttgtcacgggcaaagacatcaagccagcgttgatctgaaggtgccatgtatggactggctgcaggcagcgtgagcgatgcagagcctgggaatgcgcccgagctgccttgcaccgcaacacccatgagcgcattctttgcttgtgtcgtgagccaagtcaatcccggaagagaattcgaggctggttcctgccagttgttgtaaccgatgtgagtctgagccatgacattgttccatttgccgctcaggatgctgtggtactgcctggtgatggcctggtcggcagaaaatgcagcttgcacgtccctgagcaatttgttcgcgctgacgcgatgctgacctctgtacgtgccagcaagagcaaccttggtgtaaatttcatagacacctctgccagccacgatgggatgcaggaccacttcccagaacgacgtcctaacgtcacttggcagggcatcatggacggcttgcgcattcttgagcagagaagtccattcgttgaaattcagctcggcttcgtcgtagctgatggtatcgaaggcaaagggtgtcctgctgagatcctcatacttcatccgtgctgtgagcttgccgtatcttgtcatgatggaagcagtggtatctccagcaagttcaccccattgccgcgcaccccacacaccgagccacttcttggtactgtcgaggtcagtgaacgcttttcgatcccaagccatagccataaagtgggcagttggcaactcctacagacaagattagtatctcaggccggaagtctgataactcaagagcaccataccaatcctttgagatctccaacattggcaatccatagcttgtcaacgccgctgtcgtaagcaagtgtcatttgctcccacgtcttttgaagttggatagtgttgatccacttgtagtttcgtggatcaccgacatagtcgaagtgatagtacatgccagtacctcccaccctgtttccttcgttaccgatggggacccgacgaatgtttcctctattatcatcactccacacaattgtcacatcgtctgaaactttcatgcctttttgccaatagccaggtacttcctgtgtgatgtcagacatagttttgaacagaaaacagataatggaacgggtcaacgaaccttgtacatcatccaagcatgtggaatctcggataacggtttcccaatggttttagtcagtgtttgttgctgccaggcgatgacctcctccagggcctgagagttgagtgaaggcgacgcagcatctcccgaacctctcatacccacagtgtagatcgtgctccagttctttgcccttgtcggaccttcttgcataaaagcttggacgccagccttgttgcttctccaatcccaagagcccctcagaaatcttccttgctctttgtcagcccgggccatcggctcgtggtgacttgttcccacgaagatgccatactcagttgccgttggtccgttcctggtgtcatcgaggtagaacatgctggaccacatcgctggccaaagataattgcctttcatccggaggatcagttcgaagatgagcttgtaaaagtcgaggacgaaagggcttccatattggcttggagtgaacttggtcctgccccagcctgtcaagcctggcgattcatcgttgaggaagatgcctcgatatctgacagagggcggtccttcagtgtaagcgtcgctgttggcccagatgtattgcttcttcttggccggaacatcagcccagtagtgccaaggcgatacccctattttctccgagacgtcgtacacaccgtatgcggtaccgcgcaggtccgagccggcaatgacaaatacagagctgctcccttcccatggtgactgaacgacttggtaggcgaatgtttcccacttgttggcaatggagactgtgtcgaatttcttggtgctccccagattgtcgatgagactcgactgcccgacagttcccaccaagatgattggtttcgtccatttctgggaaatagtcgagctccaatctgccaccaccactgttccgttgacacccaacacccgtccaaaatccagggccagatcgttggcaactcgcttcacaccgggtaggtcattgggggcgactctgatctcgggagctaggtttgctccgccaagctgcaaaccggtaccagccgcggagaagctgaagatggaaggcttttccgtgtatgcaattgctggcgtaaataatgtaagagctagagcggcgagttcgagaaagggagccattgtgaagtcctgtggtgaactacaccaccacaacgatgagcacttgcttcatccatggctcgtgagatgggtctcgccgtagatatagtctaagcagaatcctatgatttccaaatggtttacacatcccatcagtaggatataagcgggtaaagcagtaaaggaacctgagagggctgctcaatatggcgtgtccgcttgacacctagagatagatgaagacgaccggaaaataaaaaagtgccgttccggggagcatcctgacagctatttgcctacgtgagaagttccgggttgctgggtcttgggcatgtctgcgtctgaatatcgagtgcggttgaaacgagaaccagtgattggtggaattttatgaagccacgaacttgagcttcattgccttaaaatggcttcatagagagactgcggagtgtggcaacgaggacaattaatacaaagtggctgttgcctggacttaaccgacccaatggcaatgtcgaggctggctgaaagggtgaggtgactatgtgatggtgagagagaaggtgagagtgaaagttgggggtcaggggaagcttcccctggatgacccccactttggcagcatctaccccacaaaaataatccaaaatcaaccagaagctgccccgcatccacagtcactctcaccgcagctgacagcaccactcgacgcttccaacactgtcttccctgcaccagtatctccgtatcgcagtcagatccccagccaagaccggactatcccacttgccgctgcccacggtgccatccgcccagattacgcacacccgccagagaacaccggttctccccgtggaggaccctggacgagcttttggatgcagcctaaacggtcacacagccttacgaaccccatcccagcgacatcatggcagaccccgccgtcgcggctcttaattccctcctccgtgaggcgtctatcgacgaccatgccgaagctctcgagctcgcaactgccgccgttcgctctaacaagatccaaggccccgacctggccagcgcccaacacacacgcgtggtcgcactcttgaagctcgaccgctacgacgatgccctccgagtcattgccgagggcggtgacgctctcgagaaggactgctctttcgaaaaagcatatgcgctctataagacgggagacctggagggcgccgaggcggtgctgcaaaagactggagtcgacaccgggaagagccagcgtggcctgaagcacattgctggccaagtggcataccgcaacgaaaagtttgaacgcgccgccgcgatatatcgggatctcaaggacgataccgagggagcaaactacggcgaggagaacgatctgcgaatcaacttgaccgcagccgatgcgcagctgcaatggcaaggaaaggagtgggccgttccagaggaggagaagcagccagcgagggaggatttggaagccttcgagacggcgtacaatgctgcttgcatctgcatctcgaggggagactacaccaaggcctcggttctactgaaacggtccagggatttgtgcgaggcaaccgaggacttgaacgaggaggaaaagaaggccgagttggtgccaatccttgtgcagcaggcctttgtctttaccaagcttgggaagctagacgaggccttgagcctgcagaatgccatcaacctctccgagtgagtctctcgttattgcgacctggtcatactatctaacctagcactgcagggtatccgagacatctaccaaggtcattgcgcagggaaataaactgctccccaaggctaccgcgaacccctttattgcagagcgtttggcccgtgctttaccaaaaatcgaaggaaacgaccggttgtttgtgttccaaaccgctgcccttcagcggaacaagaatgtcattgatcttcaggcccaaaagtttgagggcaaagagatcagagcgcacaaacttcttgctggagcccaagttcccgatctctcagtttccaaggtcgaccttggtgttgccggcgcagcagctgctaccaagtgtggggatggcaaaccgactgtgcgccagcttttgcctcttctggagaagcgtccaaacgacattggtctcctcctcacgattatccaactctatattcaaatcagcacactccccccggcaatcttgttgctcgagaaattcttcacacgcctcgaggaggcgaacacccccgagcacgttgatgtccggtttgcgcctggccttgttgctcttgctgtatctctctaccggtctcagaaccggcaaagggatgtccgcaacgagctcgccaaggctgccacgcactggagaagcaagactgaagccgcaggagcaggctcatccatcgccagagcagctggaattgagttacttcgctcctcgcacccttccgacttggcagctgctggcgaggcctttgagcagattctctcggcccagccaggggaccgcactgccactgcaggtctagttgccagctatgccacgactgattttgccaaggtggaaccctacctggaatcactgccctcggttgagaagctcactcaaggtgtggatgttagcgcgctcattgacgccggtgttgctcttctcacacctccttcttctcagcaatccaagaagaggaagtttgatggagagggcgcggcccctgaaaaggagaagcaacagccggccaagaagccaaggaagaggaagctgcccaagaactacgacccaaccaagaagcctgaccctgagaggtggctgccactgcgtgacaggagcacttataggcccaagggcaagaagggcaagaagagggctctggaggccactcagggcggtgtggtgaaggaggaggagacgctggagctggcgggcggtgctggctctgtcaaggtagaaaaggccggcgggggtggtagtggagcgaacaagaagaagaagaaggggaagaaatgagcgggtgtggtatgaaaggcggcattgcatgcacccattagatcaatgattaatgacatatggtcaccatattggattggcactttgatgaaggaatcaagcatcgttggtgtaaagctaagcagacaaaagcttctagactgcaagtttacgtacaaggcttagatgtcgaatacaccaatgggggctgtaggattacatcgagcagtcgaacaaataaacggcggcttacgtgaaaccttcaggcataccttatgcaagccacacggaacaaatgcgataagcctcgagagctgaaggctggatcatcaaagcctcgagggtagagcaaggaacttggtggaaaggatacagacgtccatgtattactgatagcgaatcctgtttgggggtgagttactctgaaatactttggaagtgtcatccccccggcttcagacgggatcatcatcgcgaccaaagtcctctgctgtgtgcaatggcagtcaacaatgttcagattttccaattgggtatccgggaccaattcaatggtgtaacggaaagggagcaaagatatgcgcaccacaaggcacggtagggcccagtctgccaccactctgctttggccattccatcctgctgatgacttgtttagtgccgcttggtatggagctcgtatcattctagaacaagtctctctagagtctcgcccgattttcgatttcattcttgagcttcaccgggcctgttctgcgaactgggatgcaattgttggtcaagtaggcatggagagggaccagctgcggcaatttctcacctacgccgcgacattcctttcaaatgtcggcaatcactatggctcgggggatcagaagtttaccttcgagatcgatcaacgctgttcccgccttacagcctcggtttcccgagcgacactacgcagagcagctactaccctggcgacccggtttcagaagaggagatagccatggtgtcgaggatccttgagcagaactctattctccccgagaatacccggattcgaagggtgaacaacagtgcaaatgactctgaggtccttgtcgcttcggtccagcgtgacgacgacgcaagccgcatccgtacctttcccaccccaggcctaaagggtgtgatacgactgattcgaggagaccactcctctgcgttggaaaacatctgcaacgaactcacccaggctgcgaagttcgccgccaacgacacccaggtcgacttcctcccgaagtatgcagaaagcttccagacaggcagtctgaacacgtaccgggagtcccaacggatttgggaccgggacgaggcaccgcgagttgacttctcgagcatccacagtgagttgtattgaaaccaaggcttgtgggttgtgtgttgctgaccatagtaaaagctcttgcatactgttctagtatcatctttccggggatcaacttgcccaatgtatgttaagaggattgaggctgtccatttttctcactgaatgttatgctagcatggtcctagtacaatgatatccgtcaggaggatggcttcaagaatgtcattatttccaacaggatggcgacggagagcagggcgctacaataccctttcatcgacccctcggaggcagagacgtttaccaagcacaagttccccgcgtaccattggtgggttgtgctccatgagctgctgggccatggtacaggacaaacgatggtcgaaaccgaggaagggaagcaaaattttgacatcgacaatccgcctatcagcccgcttactggaaagtcgatcactacctggtataagccgggtcagacttggactggtcagtttgctgatcttgccacgacggttgacgaatgcagggccgagctcgttgagcatatctgatggacgatccggagccgttggagttatttgggtttacagccagctcagagattagcgttgaagaccgcgagttctcactgctctaagacggcttgagggtactgatattgttggacattcgtcaccttcaacgtataccagcaacttgatgttgatgggctccgaggcctctcgaacttcaatgttaacaccggtgtgagcatctatgcgacgaacagtgaacgataactatgtgctaactacaacacagaaatggggtcaagcccatagcagggtaggcgttccaaaacaattgcgcatgtatgtctcctaacaatacgataggcccatttcgctgttctcaaatgtctgttgcttgatggcaatggggcggtgacggtagtccatgacggcttggcaaagaccgtcagagttcgagtggaccaatccaagatcctcacgcatggcaaggttgctcttggcagcatgctcctgaggctgcacatgtatcgctgcacagccgacgcgagtgcctgccgcgcatattatgaagagctctcagccgtggatggcgagtaccttgagtggcgggagacggtgttggcgaacaagcctccgccatttgtgtttgtccatgccaacactttcttggatggcgagaaggtagtgttgagggagtatgagcccacagctgagggtgttatccagagttgggcagaacggagtgtatgatcctttcgagcacagtctcctgttttccttctctcgcccccttaccatcccattctgcagcaacatcttccacgacccaacgatctcctatttccaaatcttcattcatgaggtttccaactaaattcagtccccgactttcttcatagagtcaacatactgcaagatttgaaagaccatctgcacaagaccgatcagaatgcttgatgtgccaaagatcaggacgctccagaacgcgagccatgcggtcgagtcccgcctgtcctgccatagctggcgaagagagcgtggtttcttgcctgctgcataactgttcaaccggacaatcctgctgcgaagatgggggaagtcaccagcaagattgtactcatcccgcccagtcaacggcacaggacactgaaatctcttccgaccgcagagctcgacgaggagctgatcttgaccctgaggtgtggcagatgtaggttgcagccggcgaaatgccagatattgatcttttaccttgcccaatgatcaaacggtacgaaagcaacacctcctccagcagacctgtgacaccctcctcggttgcccacgggaccaaatccggtctgtcgaatgcgcagcgatataccacactgttgcgcccttcattcccgtccacccctcggtgttgctggagactcgcgacgcaaaatgatgggtatcggtagacgaaaagcctccctgaaggtctgtcgagctcgaggtggcagggtaggcagtcgacccattgaatctccacgcggcagacactttgccgtccgaggacagaaaatacgaggtctttggcggactgaggaccttcgtcgttgtcttggattgatatggtgccggaacttatgagcgtgtccgtgatgctgctgatgcttttgggccctgggcggaggatgagttctggtatctggtcccaaaggagaaagaagcccgtccagtcgggatctccatcgaaatcaatctccggcagacataggaagattcgtcgtggctgactacggacctgctcgatcacccaggaacggtaccatggcagttcatcaaagacgcgatcagaggaggatgggagcttttcggtcaaggtcacggtgatggaacgtgacgatggccctatttcatcacaaggctggggtcagtgttgacactcagagatatatatggagggggaaacgcgtactgaataccgtgaagtttctcaggctttggggcatggtgtgaggtagattatctctggagcaagatagacatcaagttgaagttattattttgtcaattgatatcacagcatgtgctatataatagcggacagctgtaatgtcgcaccgtgtactcaaaacataccatcatgtattatctctgtgctgaacgtcctggaaccacagtttgaatgcaaccttcagctgagcctgacccggccatgacttcaggaaacacggtttgttgcaaccaacggggagttttttgttagacggcgaccagagggcgcgtgtgaaacagcagttcaagccacctttaaaggtgatttgtgacaagggtgggaagtgtggttgacctcccctcttttcatcacagagctgataactctcttcatcctttcctgtagcccctagcccctcgtcagagcccctccgcttctttgctcaaagagccgcgctgtgttctcatcaatgaagatgacaacaacaccaacgtgagtgccgtccattccagctcgtgtacttgaagctggtgagtaaagatagggtagtgaccatgttttcagaccagataccaggggcacggcctctgagactctccaagacgtccttgacatgttggagaaactcagccttactcttcctcgtttccaaatctgggaagagaccctcccactcgaccgtcgactgcagagcaccctcgtcgatgtgtattgtgaggttatctgcttctacgcgcgaacgatttacttccttcgaagcaatccccaccttgtcctaaggaagaactcctggcgggcctttcgcaatgacttctcgcgcactatgatgcgtatcaagcgcatgtcttgtgctgtagagagcgaggctgatgtgttgcggatgcaaaaagacgaaggccgatacaaggaagtgctcgagcttttgaacgcgatgaaagtcacctaaatacagactctcagtagtgatagtatccggtacaataacatcccctacacggccaacaccaagttcagtgggcgcggtgatattctaggcaggcttgacgaggttctgaagcctggagccgccgtgtcaccattgaactccttggccttgttcgggatgggtggtgttggcaaaactcagatcgcaacccagtatgcgtaccaaagcctggacaagtttgatgctgttctgtggatggcaagtgataatgcaattgccatcggtcaaagctttcgtacagttgctggtgggcttggcttgctggggaccgatgaggagaccaaagacgccgctggagcatcgtggaaggtgaagagctggctgctcacaacaagtaagtcatccgccattgggagtcgataggcccggcgggaggttctagtcttgtggcaaagcatgactttggcatgtctcttttctcatgaggatcgaaaccctgacgtgctcagatacaacttgccttatcatattcgacaacgcggatgatctcacatccttgaagacagcctggcctggctcgattagtgcctcgattcttgtcgccacaagggatctctctgttgcaacagcctcgacagcccagcatatacaggtcaatgcattaggcgatgatgaggggaccagatgcttctcaaggctattgacatcggcgctgcatcacaggccgatcttcagaatgcttcaaacatcagccggagccttggggggttacccctggcgctagctcagattggcggttttgttactcaacgcaagttgtctttgcaagaggtcctcccgctatatgagcgttacgccgccaaaatcgacgcccggaaggctcctagaagcgactacgaacgtaccctgagcactgtgtgggatgtctcattccaaaagttatcagcaaaccccactcgacttctctacttactatcttacttcgacccggatggtatctcagaagacatcttgatccatggttctgagggcctcagcgaaagttttgcattcctatcagatgaacttgagttagtgttacagcttcccatttagcaatgttgaaaaaagagaccaattttcggtcagcctaggtgatgcttcggaagagcttggacctgaggatcccttcattgcctatagtcttaacaacatcacgctggcatatactgaggtgaacgcactggatttggcctgtgagactcatcaggaggccattagactccgactgaaggcgaatagcgacagaatcggcaattcatacagcaatatgtcgagtctacttctccgcatgggccgtccggatgaagcggaggagatgctcgcaagatgtccctccctgaaggacttcactgatgagacctttctcagcactggaaatcctcgcttctcaggggacatggtcttattgtcgcgtattcgtcttgctcaggggcggacgagcgaagccttgcggctggcatcaaaagcactggcctttcgtcgcggatttattgggcaaccggctcaaaacttgcgactctcagtacgatgtagcctcaatgccgtaccgggatggccacgttagctcagctgtgtaagtgccaactttctgcttactaccgtcaccctctgctaacatcatggcattagtaacctgctggaggaggttgttgggatttcggagactctggtcgagggacaaggacagcaagctcgtgctctattcaagctttctcagatacagggggagaatggaagagaggctgaaagcgcggctctcaaggaacgggctgtttagctcctggtaaaactcaaaccggagctcaaggatgcgccgttcgaggaggccacatttccaaaactggtcgtctggatgttgtggtaatgtgtcagctttcagggattgtaacgaagcaatgataacctcgcaacacttggcggtgtgctcacatatcgtcatggtgaatagcaattggaggcacatgtcagaaagaggcatcccattcaacggccccgatcttggcagtgggacacttgagccgcaacggggcatctgggccggtctgccgaccgtcacaggctccacgccggtagccccaccaaccatcaccttccacaacgaccccaccaatgccagtcacgctgaaccccgcctccagtcgcaagtggcagtgggttgcggtggttctttcccctcccttagactagttcgcttcccgcagcattgggaagctgtcactgccagtgtcccttcccttcccttgtgtaaggtcttctcttacactttcctctctgttggggaccaatgagaacatctctaaaagtcagacaacgttctccttttgctccttttcacggacagttctttccgcttgtcttgggctgatccgtccgaaccattatctatatacgagatcaagatatccccgcccacaaccagccttttttagatctcccaaacggcccgcttggaaagccaatcgtttagaggataacccggccgtcttcagctttcctttcgcctctccaaggatagaagggtggatatcacagcaggccccagagattctcgaacttttttttacctaaaactcccaaccagggggccgcactcctcatcccaccctttatccgtttccatttgtccacaaacccagaagcgaaacgcgagtgtggcgacactttagggaaagacgagaccggaccgggaaacgtcacctatacctataccttgcgcgttcccgccgctgctgctgcttctgatcttgttgacaggaagtttaccattgacatttcctcccaactacgacaacaccaccacactttcacacatcgcactacaccatagccagcgtatttgattttcttgacgttttcgacaaaatctaatatctaatcccccctctcaccaccacccatcccctctcctccctcaaagccgcaaaaatgcccgccaacaccccaacaaaacagcgtaaaatcgccattgtcggctcccgctccgtcggtcagttttcttctctctctctctccctccctccctccctctctctttctctctctctctctctaacacacctctcccacaggtaaatcctcgctcgcggtccgctacgtagacgggcacttcgtcgagtcgtactaccccaccatcgaaaacacctttagcaaagagattcggtacaaggggcaggactattcgacggaaattgtcgacactgcgggccaggatgagtacagcatcctgaacagcaagcactttattgggattcacgggtacatgttggtgtactcggtcagcagcctgccgagctttgagatggtgcaggtgattagggataagattttgaaccatttggtgagttgcgcgagcgttagtgagggctataccatcgctttctgcgagaattggagggtaaatgtgggatattaggctgacttgtgacgaaaaaaaaatagggaacggactcggtccccatctgcatcgtgggcaacaagtctgatcttcgtcctgagcagcgacaggtcacgccggaagaggggaaggcgctttgcgaaaagttcaagtgtgcgtggaccgaggcgagcgcgaggtatgatgagaatgtggccaaggcgtttgagctgttgattgggcagattgagaagacgcagaatcctggggaggaggtgggggggagtaagtgtgttttgatgtgaaggatgggaagaggggagaagaggtggggggtaatggatcggagatacccaagagagagaagtaaggagagggggtaatggacctggaatgggacacaacaacgtttttttttgttttggtgattggttgcggggctagggagtaaagcagggcatggtgaaagtgtcttgttcctttgctggtttgccgctgggttggttgtcacagttgtgaagtgccctcgttttcaacaggggcatgttctctacgttttttgtcttttttttttttttgttcacgatttgatatgcgatgtatgaacctggggagggtttacgttttcttgtcttttcttttttcatcatctgttttctttttctcggccgaggtcggcaacggttatatgtttcgggaaagggatggggaaacgagaaacgagcggacgtcgaacgggttttgcggttgtttattgatgtctattttgtgtcatgttgtgtatgatgaagcgggcggtataagtcacagtggatcgatcctaccatgcatatatctttcacacaaaataaataaatctacgacaccctttacggttgttgtttttcttttttgtttcttcgactagatgcgatgggctgaaggttttgcttcaacccactgcgtttgctcgaggagacaagaaaggaaaacaataactgtaaagggtgtcgtggatctgatatgaacatattttctccctcctgaaaattgacactggatgctgggcatgatcgactggtggatgagtagagaaggatcaaggctgactgcttgataagtcacagatggaaatacaggtgacacgcatgtatagatgagccgttcaaagtgaccggctcgaagcaagagtcaacacctcacttcaacacaaaacaaataacaatactttttcagttcaaatcattacacactcacaaaactccctgcttcccatgcatcatcaaactcttttttatatttctaccaaaaagcacttaacgaataggaatctcctttgtctcctccgccttcttggccttgccagggaaagggataaagtcaggggcgccaggaaggtacttgcgcagtggctctgggattttgacgccctaaatcacattgtcagcacatcacatcactcaacacactccccccaggtcaaaaacttacatcctcagtctggaagttttccaaaatggcgcaaatagttctcgtggtggcggtaagcgtagagttgagggcgtggacataggtcttcttgatctcggtctgtttcttgacgccgaagcggatctcgaggtctctgctctggtagtcggtgcagttggagcacgagaccagctccttgaactctccttggtgggggaaccaagcctcaagatcgagcttcttggaggcggcgttgttgagcgcgccggaaacgatggccacgacgcggtaggggatgccgagcgacttgtaaaactcctccgagttggcaatcatctggtcaaacatctcccacgacttctcgggatccgtgaggcagaactgctccaccttggtaaattcgtggacgcggaaaatgccccagacatctctgccgtgctagaggggtgtgagtaaatgtttttgcaggatagacgggggcaaaggacatacagcaccagcctccttgcggaagcatgtcgagtagccggcatacttgagagggaggtccttggattggagccactcgtcgctgtggaacgcggagatgggctgttccgaggtctgttggatgtcggtatcagaagtatgccaaggtattctcatcgaatgtcacggtgatacaagtgcaagaaataggggtaaaaaggggctactcacagcgatcaggtacttgtcagcttggtcgccagtgaccttgtacagctcctcgtcgaatctgaaccaacgttagcatttaatctctatcgtcagtccagaaggtgaactaactgtgagagctgagcggtcttggccatttgctccttaagcatgagcataggagtgccaagagcgatgtagtccttctggtccaagaactcgagaccatagttgatgatagccctgtttgtctcccgtcagtatcctctctgcagtttcgaaaagagtgtcgaatacgtactggttcaagaagaggccccacttcttgaggaagtaaccacgatggccaacaaccttgacacctctgactgggtcgtatccgtcgagcttctcgagaacttcgtggtctgtccaacgtcatgtcttagtcattgcttctttccaaccatagacctgcggtgtttctcacgagaaaggacattcttcttctcaaacgtgacgccctcgggagcccacgtccgtacgacctcgttgttgtcctcgttgttagacacaggaaccgactcgtgaacaagatttccgatggtcttgagcttagcgttcaagatctgctgcttctcagcagcctgggcgagcatgtccttcttttccttttcgagctcggccttcttcgcgaggagttcggtgacatcttccttggcctgtttgcgagtgcgcgcgcatgtcagatagccgtcgcaaacatgatgctggatgaggttcaaggtttatggtaccttcttcttggggccgatctgcttctggacctcgttgatcttggcgttgaattgtgtggccgcgtactgagctgttatgggtgatcaaagagatcaatcagtctactgtggcatgttgtacaattcggggcagactagaagttgactcactcttgcggtggtcctcgaacaaggcaatcacctcgtcgacagcctcctcgggagcatggcgcttgcgctgggactccctgatcttctcggggttgccgccgcgctcggcaatgaagtcgttgatgtcgagcatggtggtgactggtactggtaggtgatgtggtgtagaggaagaagaggatgtcacggcaaaaagatatggaaagatggcaaagtacacacagtcacaaacacaacgtcgctacttgacttgcacacacagtggatggatggactgatagaaggacgggactcgctctcgaggacagtcgcaacggtatggcggggcagataattatttcggcggcggggtggaggggaaggtggggcctcgatctgcttccaagttcaaagatgagaccaggggccaggggtcctcctcttttatagcgatatccaccaatcatccctgtgactcaggccaagaagggatgctgtcattcggcgtagatgcatataaaacaatgagaactgtatttacaggttaagaatacagcgtatgagtaacgatttatctcacaggtcaacctcacagcccaatcctgtcactcatacaaactctttctcttcccacttccactctcaaggactcccacaaaccgccaaaatgaccgaagcccgccaccaagtcaacttcatcaccggcaacgccaacaagctctccgaggtaaaggccatcctcgagcccgccatctccgtcacaaaccagtccctcgaccttgtcgagatccaaggcaccctcgaggaagtaaccattgacaaatgccgccgcgccgccgaactcgtcggcggtcccgtcttggtagaagacacctgcctctgtttcgatgctctgcaggatctcccaggaccatacatcaagtggttcctggggtctatcggccacgaaggtctcaacaacatgttgcttgcctatgaagacaagggtgccaaagctgtttgcacgttcggatactctgccggacctggacatgagcccatccttttccagggcatcacacacggaaagattgtgcccgcaagggggccaagcaactttggctgggatcctatttttgagtatgaggggaagacgtaggtttattttcagaggacgaggaagtgagaagaagctgacaggataacagatacgccgagatggacaaggccgagaagaacaagatctctcaccggagcagagctttggcgaagctccaagagtggttcgccaaggagatgaccgcgtaagtcaaaatctgagaaataaaaataatcacattgcggaccaaacgatcagtgcttgaagtgttttacaaaagctctacatgtctgataaggccctctagcatccaagaagacccggctgccatctcgatctcttggaccatctctatttctatctccccctttccctcctaataccgcctagcatagcactcttgtttcaagcgcaatgtgataaactagtgctactgaaccatgttcgctacctatctgggctaaactggctcatggagatgatatccctgaaatatagccaagaataccacagcagtatgactacacgcttgtcccactgataaccatcagtacgctccatgccctcgtcctctccttcctctcctacctcctcttcctcctccacgtggccgctggtggtgaaccgggtacgtcggcatctcaccaaaaagagtctcaagcgtcttttcgaccttgtccgccacctttttcccaacgcggaaccctgcccacaccaccgctgtatcctcctctgtcgtctcgtaaccatgaagcatcctacagatcattagcaatccgcacacatcttcccagaacagaagtcttactcgccctatgtacttccctatccccccacaggtaccgccccaggaagaagcctatttctcgtcagcgcccatcatcatcatcaacatcatcaacaatttagtccaacccacttcaaaagctcaaactctttaaaatcccccaaataccccccacccctcctataccccttcagcgccccatccggataaggatacctcaccggcaccacccccgcccccctcttcccatcgccaccattattactgttattgttcatccccaccatccccaaaacctgataacaatccttaaaatgcggatcgaaaaccaacaacctcccctcccccgtccccgcccccctctcaaacccaacaatagtcatcgaatgccccaaatgctgaaaatacaacggcggcaaccccgtcaacctcaccttgcccccctcccccctcactatcgccttgtcatctgacctaaaatactcctccaccgtcctcagcagcatctcgaccgccttggcgggggacttgtccttgatcgactgggcagcaaacgggacgcccaagtacctaaacatggccaccgcctcgggggtgccaatgtactttctcgtgttgcgtatcccgcctgtttcggcgcggcccgtggcggagatgttgttgtcccaggccgtctcgatgtagtcttggatttggaagattgttgggatttgggaggcgagcttgtgggcgttggggatggtggttgattgggggggttgggttaggtaggagcagagcatttggatgttgcggtagccgcagaagccgccttcgcgcttgagcttggagatgtggtggacgcaggggtggcagaggtaggcgcggtgggtcgagggggaggattcgaggagttgggctaggaccgggactacgcctggggggttttgttaagtgttttgcgtgaattcgagagctttgagactgcttaccagctgtttggacttgtccctttttccgtaaaaggtccgcaagccagtctggcattcggtcttcgtgcgcatatctaccgagatgcttcctctgttcggtttcaatgttaacaagagctccttccttacttaaaatgcagacatgaacttacacccaaccgcgtcccgcgcgttttactctcggaatcgccagacgtcttagaatcatggcgacgccatagaatacgatgtgaatatgaagaggaactaggcattttcaggagtcttttccacgctgatatcgccttggagtggcgtgtacttggctccgaggccttgtgagatgattttgatactgattcaggagcgtttgataagggtgatgatgatgcagtaggttctgacacggctgtgatagggtctggtggaggagggtgatgatcatggacgccggtctcctctgcagtatggagttctaagtgatattccacctggctaagaagaagaaattctccacacccttcaaccgggcactcgacgtatcctggatcgtcgtcattgcccgtgttggcagtgccattactatttggagaaggggaggtgccgtcttgatcagcaacagcaagaaagggcggttctccttcagcgtgcagcgtttccatgtgctttgtcacgttgcgcacctgaattagcgggcaggctctacgggggttggggtcggggtcacttcaaagatgggaagccggcgacaatatcattgtgttctgcaaacggaagggacttacaagcagcatttgatactcgccctctttggtcttccagccacaaaaggggcactccattgtgtctgccatggctggatggagctccagaggggctttgtctgttcgagtccagctgcagggtcgtcgcgtggagggcaaggataatggtatccatcaaagagggcgatgtgactttgctgtaggaacccgaggatacatgatatccgcaaaaagagcgtaatgatactttgccatgacgagagaatgcggcacgttcccagagttgcgtgaaacttgccccgagagaaggcctgttggccaattggttgatactggatagtgccgaaccaccgttggcagagtggcaagttgtgccatgccttgttcggcttagggtatgccgttgttggatatgcaagggtgctataccgcgacaaaccttcaaggtgcccatcttgatagatgttgtccttgatgtccctaccaaggcaacttgaggttattccaactcggctgatcatcaacaactacggtgacccaacgctctgggtcactttcgttacgagctcgcctggtcagccctggtatttcagctggtattgaaaggtttgccccgcaaaaccgccgcggagagtcggcccaatgcggttagactgttggttttactgccacccttcaaccgtttggagttggaatcttgacttcttttcttttcgctttccaacatcgatattttgatcttgttgtacttcaacttcacggggttaccgatgcagcaatacatctcgtgagagcttcatgtttcatttccatcaattggccggagcgtattcagctggagtcggttcccaatccggaagtcatggcgatacatcgcgtattcgcggcaacacatcaactgcctgtgaccgcaacttggagtccctgatctggcttaattccgatgcatcacagggccaccttcacgctacatcccctatgaaacacctctacgactttgccgtcgtttattccaaatggcggaggcacaaacaagccgattgcaagatcgccgtcacccaagtttggtaccagcgcatgtggtcagcagctctgcagcaaaagggcgcggcgcggggggaagcattgcgagctattaaccgacgctgcctcggattagtgtttcgatctcgtcggaagcgtacctatgccacatcttcgtacatacagccgaagaaaccgtcggatgccgcctttgtcagctgtaccatcgacgttggagtagatgacctctatcccaattgtcgtcagcggattcagaacccgaacaccgatctttgcaacaccgaaatccgatcatcaacctgttgtgcatgctgtcacgatgaagtcaaatcctagttgtgatcccgtcgctgcctgtgactcccagccgatatgtttttcgcactaaaagattacccattggggcgcagctgactattctctaccaggacatggaactacctagttttgttttccatcttacggcccaagctctcgtcgtcggcagctatgacgtgtcggcgttgaaccctcctgttcatgggaacattcgagcccgggagatccgccccagtggacgccagggacttcgctaacgaagcccatgatgcctaaacaggaatcttgttcgtgcctgggtcgaactgcctctcccacatggccccaggcaacaatatgctgtcaaaggagatgcaatatcttcaccacagtgaagacgtcaaggccgaagagcgagacagtgccgtcaccgacatctggccctcatggaatcaaacgaagagcccactgcgcatacccggatcgcccaggaaaaccggatgccgaggtaacattgcgtcgatacgagcttctggtcatgccgtcaggctatcgaaagttctttcttgtcactgatagaatccctccaaacaggccgaggggaagcacgtgaatattgttctcaacgttgaagaaactcaatgtgaagcttgaagaatacttcggagctaacagctttggggacgatatcgtcagcaactcacttacatccggtcttggcgcaagcgggagatctccgagtcgaaaagtcttggctttccattcttaactacgacaagctttctcccagtccgctaccagacttgggacccgccgttcggccaacaagccactccctccctttcctcaacaccggtagtcaattgcaccctgccgagtaggttggtgccacgcgcaatattctcactaagccctacgcatggctaatatcgggtgtcacgtcaaactagcacctctagcgtgacacaggcgaatcaaggtatggtctaaataatgctagggcacggtagaagagccctgtagagctcatcgactaggcccatgtccccctgaggcgagtattccgttagcttccaggcaggtattcattgcctgtcttcgatgaaaggtttcgcccccaaacaaatgaacacttacagatcagctgtgtaattgttcatgcaaggacgtttccagagccgaaatgtggcggcggcagagcacgcagtgcacattgcaaatcagggatcggtcgacacgatcgaaacaagcttccggcttcattatggcctggctttggaggctgtggcacaacaacaccacgggcatggacattttagtggccgcggagaagccaaaagattccaactttgatgttagagatgaggtaagcgacaatgttattggctgtgaatgctgatcggattcacaaaacagtgagggaaataccacacgcacatctagatatgaggaagcaaccaatatcagtggacttgatctctagattgggaaggcgacaccacaacacagaagagtcacagacttgatatcttgcatatcgcaagggttctcccgtgacagtctcggggggcggaatcggctgtgattgggcgccagatcagcaattgaggctgaagcaggtaagccttggctacatgatagtacatattcacataaccatcaggagaacaggagtgggtttgaggacgtccagagagggcataggtgaaaggaggttgccgtctcacctgcaaagatcactaaaccagcagtgattggcagaacagtgcatgctctggctgtgtttagttgaccggattactcaacccactggctctactatttcattcccgcacatgctgcaaggcccctggaaccgatcttactcgattttccctccagtcttttgttaggtaatactttggtacatgtgaaaacaaagataggatcaactttccaccatttgaccccgggctaggcagggatctcggaagtgggtgtaacggttgctgagttaatcaccattttccacgttgcggagacacacccttctttttacttggctacctagagtaaaccccggacaatcgcacggggcggcattctagcgtacggcggtagctgcaagcaaaggacatccgcctcccgaagctgtcatcctgggcgtcatgttcttcccacacctggctacctggctgctgctttacctacacaaactacttagctggtatgtcatcatggaggggggaggaggagaaacgaggggtgattgtgtgtgttacttccagccactccatgtacgtagaaaggaacctcggaattaagaagcgggtataaacttgggggtggttgtgatgagggggggggggggggcggaagaaactgggttacagtatggaggaatataacttgaagctccctccctcacatggaagttcggattcggctcgagggagattcagcaaacaaggttttggtatagctataaaaatattgaagttgtgtgttgaatactgggacatactctaccacttactacatcttacccttttttcttacgagttacccaaacaagataccaaccaccatttacttccaaccaaaaatggcagacactctaaagaggacattccatggtgagtaaaccccctgccaagactttgtcatcaaccccaacctgccttacctcactcacacccatcatcatcatcatcaccattgtatctttccctcccattcggagggacgggaaagcaatatacatgcatacactttcctgacatcagctaacaaccacccttttcccccacaggctgcctaacctgccgcaaacgcaaagtccgctgcctcggcggctccccctcctgccaaaactgctcccgcatgaacatcacctgccactcctccttcgagaccaacctccgcatcagggtgtcaacgcccacaggacaaaaactggtggacaacaggcctgccccccctatccggggacctcgccgttgtttaccgcaacccccggcggcagcaccagcaccagcgtttgaccacacccaccaacaccaacaaaacgagacctatccctccatcacgttcgaacctcacttttcgtcgttttccctgtctcaatcaccaccaccaccaccgacagcgggttatgggcagggtcagggtggtggattggctgttcaagtcccaccacagtataccaccaccactactccagcagcggtttcgatccctagtttcgacaacgggctgtacaactggaacagcagctttgacttttcgtgtgtagatcccagccttgaccccggttttgggaatggattcaacaatggggtttcggcggggatggtgaacagcagcagcacgatggggtacggggatttgatgcctggactgctgttgccgcctgggtttgctacttcggcgcagatgcctgggttggtggtggtatcgtcggagagtgactttggtggtggtggtggtggtgtttttcttccgggggggcaggaagggacgaaggagtgggttcctaaacggaggaagaggagtaagaaggttgttgagaaggagggggagggggagggggaggggggtgggtggtcgtatcacaggtgagttttgaagaggctatggattcttttggccttgttggtggtgatgcaatctggctaacaagtcgatagaccacagccttaccacttggcatagccagttttttcttgaaagtcaacatagtccagaagggctccagtcacggagaaggtataaatttggtaccagctagctcatgccatgatgctctgatgagggctcagccatgggagacgaccaccccgtgtgctcagaccagagcttgcagcatttttaccgcctaccgcagcgagaggggacacattgaggataacagcgacacggaaaccgagggagaaatgataaccgcccctctttcacgttggtgaaagcaatgttttcccgttgcatgacatgatccgctgttgaactacacgcgagcaccgatcaagaccaccagccgggcgcagaagggaaaccagttccaccagttgccttcgaaactcgagtacacgcagcgggggcatccgagaggtcaagataccagggaggttgaggaggagttgagaaaggtgggatgggatgggatgggatgggatgggatgggaggggagtcggaatcccgcgatcgagccatcttaaagtatgactgtgagagagacggggttcgaagctgacaagaagaagagagacatgaagtgtggtatatcagacgagatgaatagatataaaccttttgcaattatccgtgttctacaacttggcgcacacagtaaaaatcgtttgtttacgcaactttacgtttcaacccgttacgccgaaatcaaattttagcgggggcacacttccacttatacattttttctcaccacccgctctcctctcactcaccccactactcatattaatctcactcaccactcactctcaccatccatacctccaaaattctacccccctttcacccccaatatttcacacccgcaaacatgacaagaaccctcccaaacataatcctaaccggcaccccaggcacaggcaaaacaacccacgcctccctcctagccgagcgcacccccctccggcacctctccatcaacgacgtcgtaaaagacaagggctgccacgagggcttcgacgaagaataccagtcctggatcgtagacgaggacaagctcctcgacgcgatcgaggagcaggtcaaggaaggggggtggatcatcgactggcatgcctgcgacctcttccccaagagctgggttgacttggtggttgtgttgcgcgccgggacggaggtgttgtttgatcggttgagtaaacggtaggttatcccctccccctcccccccttcctctggatttggagggtacatgtctggaaagggaggggggaaagagtggtgtgggacagggcaggaggaagatgaattgatcgctgacgggaagaatagaaactaccccgaccacaaactccaagaaaacctcgacagcgaaatcatggacgtcctcctccaagaagcccgcgacagctacgacgaggagatcgtcgtcgagctccagtccggcgacgccgacgagctagaggcaaatgtcgagaggattgaggcttggctggagcagtggaagaaggataataaccaaaattaacttgtcttttccttatcaaaattggagttgggatggcatggggaaatttgatgggtcacatttttcacatgacgattggttttcagtaccttagctaaggaaagtaaaattttcaaaaccatgagacacacattctccctgacttaaactgtgtgaaatatcaacatcaagatggctgcagcgagtgagtgagtcgtcgggcatcaaaccgttcatctcatatcagaatgcattaaacgaggttttcagtaagattttatatggcgtaatgatacatggcaattaccaaagttacagccactcagctcgtccagaacctatcaatgacaacagacgatgatctcagcaacatcaatcatagaatattcaaaatcctaaatcctctccttatataagaggattatctatgcaccttatacaacccctacttcctctacatgcacccacccaagcacttcaagtaaaaatcaagaataaaaccacgaaaccatcaatcatctttcatgctcttcttgcttctactacctacacaacaactaaacaccacacagctagctacaagaaacaacacccttcccctcctctgtttggccaaacagaaaaaaaaaagaagaaaaaaaacagaaccaatgccccaaccgggccagccagcagtaaagcaagcctcttcttcctccttccctcctccaacaagtctaacacccaacaacaattatcatatctatttaatatttttcctccctttaccaaaccaaccaacccatcaatccatccatcttccaacgccaacccccatcccccaactgccgactcaactttgtaaaaaggtatgtattgtaattttatcctcatgaaaccaccactataacaacacaccccatatgtagtgtatccgtggcataaattttcacactcaccccaaccacccctacttctctcaactactaaccaaaccacctcaccccccgttcctgcgcaagaacaaacccccctcccacccccccttcatccgctgttactcctagacttcagcataacattcctggcggcgggcggcaccggtccattattcccactcccattcctccacgaactcaacagcacactcgccggcctctgatgatgatggctcgacccccccggagacggctgctgttgttgatgaaaacccagaaacgagcgaggagccacctaggcgctcgcctgtatcgatcccgggccctcctccatctcctgaagatcattcatgctgtgcgtgtcaaagtcgcccgcctgcgacccaaactcgagcttctcctgctgggcaatagcctgctgggagacaatctcggccaggcgcttcaaccgtggggtttggagccctattcatcattagttagcagacattctcacttgtaccctcacgggaaaaaaaaaaaaaaactcacaagacggcgtataagtctccaaagcagtaatcactctcggctccgcaatctcatacggcccgctgtcgtccatatcgacagcctgcagcagcaacacatcgctcttctccgtcaccctcgacgccaccgccttcataatctcgccattgatcggctgctcgtaatccgccaccaggtactggttcagcagcttctggatctggttgggcgacagcatccagcaaatgtcctgaatgatctcgatgtcgttgagcgtcgccttcttgagctgcaacagcttggtcgcctgcatcaagtgctccagctggagcgtcccctcgggcatgtcgtggctcttgcaccactcctcgatacgggtgatgttgtagttgatctgcagaccacgcttccaagagaggaagttgcggcgcatgagcagatcgttgaacgccgtcacgccaacaagcctgagcagctcggtgatggtctgggtaatgatggaatcctcaaggtagtaagccttcatggcgcggaagacgctgttaagaagcgacagcaagttatccatgctgtacgcgggagcagagttgccctgcaaaagcttgccaaggaacctgttgttttcgttcgtgacgaagcccggcagggactgcgactcgatgatggcgggcacaatcatcttgttaagcttcttcttgagtaccttcatccaggtgtggtaaatgttgaactcgagactctcgagatcgtgcttgacaatctccaacaggcggtcatactcgtagttgtccgtcttttgggcctcgtaccagtcctcggcgaggaagacaaaagacagcatctcgtggacgttggagagccagaacgcaccggggttgatagcctcctcgtcgtcgtggttcatcacctcctgctgaatcgactgcatgacgttggcaaggaaccgctccgactccttgacgaagccgttgttccacatctcggacgtcaccaagttgatgagatacgaagggaaaaggacctccttgtcggtaggggcagggttgctggatggcgaagggatcttgaggttgcgaataaggccaatggtgacctcctggttcaggccctcctcatcggcaaggagaccttccaactccatctcgatgctatcaataccgggaataaatgtcgaaccggaaagagtagtctggcggttcatgccaggaacagccatggagacagggcgggggttgtaggccatgctgtacctatccatctcgcgaggctctgcacccgcactccgtctcttgggcttcttggacgacaccagattgatgagaccggccggcgcagcagacgccggtccgttcccgttgacaagctcgccgttgacgggagcagctcttctagcctgctccagtgcctcttgaagctcagcaatctgttgcctgagcgagttcttctcaacctcggactgctcgctctgctggcgcgcagcctcaagctcctcgttggtagcgcggaggctctcccgaagttgtcgctcctcctcttgcatcctcttcacattcgccgtcgactcctcaaagctagtctgcagcttcttcatctccgcctccatagcctccagacgagcagccgcaataccagcctggttggcctcagtctgcagctccttcgtcctagcctccagagcattgtgcctatttctccaaatggcaacctgcccttcatagttctccacctgcaccttcaactccttgttctgcgccttcatggtacccaaagactgcgtcaactcaacgaccttgttctccagcttgtaagagatctgcttcaagtcacgagcctcggcacggacaaccttgtactccttccgagcagtcttgccacgccacaagctctgcacaatgacaatcttgcggcggtagtctctccaggcacgaagctgttgtctcgagcgccagttgcgctgaatgataagaacagcgttgccaacccgggtctccatgatctccttgcggcgcagataacccttaatagcggcctgagcgcgaatgacatcgttgcggataacgaggaactctctcctctgcttgaaaccacgccagttcttttggatggtaaccgcagccctgatcgtccgcagctcctgagcctccttgcgggccctgtagccccggaagagagcctggaagctgacaatggcacccctggcagcaagatacttcttgcggtagtacttggccttgaggttcttttgaatgagaatggcgcagtcgttgagacgggtcgtcctcaggttctccaaaaaggcaagcatacccgccctgaagaagatcttggtcagacccatctggtacttgtccatacccggggccaccttgttggcgccgagggccttggtcaggatggcatcggccatctgcctaatttccgaggtccattgctgcgacggcaccaacatgtagtaccgcagcgcaaactcctcatacgtccacctcgtggggtaacccgcacaactaatacggactgtttcgagaacaccgcaggcgcggagctggctgagaaccatggggccctcaaacttccacgcctccttggcctcgttgggcttgatacatctgatgtagtgcacatcagtgctgttgatggtggtcatgagctcgatcagcgaggacttgaagatgcctcccagagtgggcttgcggttgacggcgacgccaattctcctaccggccgccggcttcaccgcattagagcttgcctgggcgaggtccttctcccgcaccgccgacgcggcatccaacacctggccgaggaacgcattggtcgacgcgcgcagtaccgccatgtgttcgtcgggaaccgtgtcacggttcttttctatgaaaccgtccgactcatacgtgacgtcgatggcatagtggcagacggtgaaagacgacttgccgaaccttggcttcttgtagaacttgtgcttgtcggcagcatagttgtggtggagcttggtgacaaactgctcatcagatcccataggcagcctggattcttcatcaaggagagaaagaataccgagcttgccctcaatcaaatcgatacagggctggttatccgcgaaatcaataaaggtccagtcgatcttctccctaagatactcctcctgctcaagcttgaagacgtgctggttgaactcttgctgcagcttctcgttggcatagttgatgcagaactgctcaaacgagttcttggcgaaatgttcgaaaccgtaaatatcgagcacaccgataaacgacttgaccctgctgagaacctcctcggtcgccaagctcctgtttataatctccaccagccagtcgaacaagctagagtagatgaacttggccacggaatccctgacaacgatagcctgagcttgcgacaggttcgaagtgatcttctcgccacgagtgacaagctgcttcttgacaatccacttggcaaactcgggggcatcaataccgagaatctcgcaagccttgaccaacgatggctccgtcgcagcgagcacgctttccgtcctggacgccccgatcttgacgttgccgaggtggagcaaaccagcaagcagcttaaagatctcggcctgctcgccctcactcacaccaatcgtcgtcagcgactgcttcgtcgccttgaattccgccttgtcgtccacgccgtcaatcgtcggggtgttgccctggttgaggtagtcaaactgctcaataggcagcagacccagctcctggcgctccttgtccgtcacaccggctacgagctggtagaaaatgtgataattcctctccttgagcggctggaagaccaatctcgaccgttccagcaaatatgtcctgatcttagctccgataatatttgtttccttgtcgaacatgatttcaatgtactttccgaaccgcgaggagttgtcgtttctcgtcgtcttggcgttaccgaaggcttccatgatggggttggtggccaggatagcctcttcggtcttgctcatcgcctctgggcccttctttgccctcgatcccgggctgtctgatggatgtcttgtcgcgaagtatcgcatgatgtacttggcgctgacagttttaccagcaccggactcaccagacacgacgatggtctggttcttgttgtcgcgcagcatgtccctattcccagcgtcagccaaccgcctgtgtcccaaacctcgcatccaccgcgggtccctacatgaaagcttcctcagcaatggcaaacaggtgaggagcttgtgtggctctctgcttcccggcatatacttgcaccatgccaggtacgtagagggaatcgacgcgagcaaaggggttggttgctatcagcacaataccggagtatgtgtagatctctttttggaggtatcgaaggcgaatggcctgcagaactgtattccggcaaatatcgtcagcatgctgttgcctcgtgccatctctccatcctccaccgccatatcatctttgggctatttaccggcaggctcgttgagatgggaaagatttgtcaaatcatcgctggcttcgagcatggtagggttcatcagaggaggtaaggacgggtcgttgccggactggagggcctccagcgagacctcaagttccttggtctgcaaacacaacagaagtcagcgttttggatgagcttccagcgagtatcaaagctgcctacctcgtcattttctaaccggaagatgagcttgactttgtccccatctaccgtcttcttgacaacctcagacgcaacccagccctcggttgcgtcgggctgccacgctcgcgtgccaacatcataactctcagacattggatgtggttgttttctggtcttgagctctccctagctttgaatgtggtattaaaagaagaagtatgttgggaaaagaatccagttattactggaagctgtcgcctggagaagaaaggatggccagtattcgcagctggaggcgggtaccgtgtgctgggaggtggttggctggctgtgttatttggtaggttggtattcgtcgtcgtcgtgggttacggaagccggggcgaacacgcaactggcggaaggcactgtgctgagctgtgctgggggggcttggctgagaagcactggctggctgcaaaaaaaaaaaaaagggcgctggcaactagcgggtgatgcgaatcaagttggaggcggagcgtctgcctttgaacttgaaggcattcatgagtaggtgggaagggaggaattaacggggctgttaattgttaattagcggtcactaggtttcggcggtcgaggaatctccgctttcccttctcttgtctggcactgacagcaacaagcctaggtactagacgatggcccttgggttgtggtggagttggatggccgctgcagagtgtcgtttgtctcttgctgcaacttcttcttcgtcgtcgtcgttccgggctcaagaagtgaagcttgagaaaaggttaaggaagacaaaacgaaaaggaaacccgtcgttagagtttagggggctgaaaaaaagagacagcgtgcatggactggcgcactgtagaatgctcgttgataggtaaagaggagaaagacagtggtatcgcgtcggtacgattggattggcgggggggttggacagggcgggcacggactctccagtgattctggggcacgcctctctctccatgttcttgtctcacgaccccctatttttttgttcttgttaaacttgggaaaaaggaagaacaaaaagaagaagccacacatgaataaacattctctccatcctgtcaaataccttccacctatggccccctcaaaccatccaacctcacctcacccctcaaccatcccagcccaaacctaacccccaacaaatccccaaacagcccagcttggagatgcctgtcttgcatttgccatcctcatgcctttcacaagggaaatcctttatactcttcgttaccgcctaccacccgccttacagatgcccccccttttcacaaccaaccaacccgaccccatcttcaaaaagggggctcgttcgttcagcattggaatccagtggagcaaaaaagctgatgcacatcccatatgcaggggttacaaagtagtttccccccccctccacatcactaacaaaagcggggacatcccctttctttctctctctgggcagtttgatagaaaaccatgctttgtcaagtgagccctaacccgcctctgtgtttcaacctcttccatttccaaccgctcaaggttgttgtttgttatacagcattatctaaatatccaacaaccgcgagatattgagttggttttggctcagacgcgggctcggaaaaccacccggtcttgtatatggaacccacctactgacgtcgtccacccgtggtctggtcatatttctcccatcactttcaacaacactctcaatatggttcaaaatcacaaaaaaaaacccttccaaccacctcccataaacaaagtggacatgtctcatcccatgcgaaacgccctccaaaattctccggtaggccaactggacttggcctgttcggcgtggggtggacgcaccttaccaaagcacgctgttgcacactcgatcccgtcatttttcaggggtgccctccaccacctcaccaagcacccactatccacaatcctcaccgctttctcgtttcccttttcgctgctggccgtcttgttcacctagccctgtggaatttatacatggcatttatgcactctcattctcacaggctcagtacataaagccatcatcgttgtgaatatcaaaagtcatgttattcttgatctctaaccccctatcttnnnnnnnnnnnnnnnnnnnnnnnnnnnnnnnnnnnnnnnnnnnnnnnnnnnnnnnnnnnnnnnnnnnnnnnnnnnnnnnnnnnnnnnnnnnnnnnnnnnnnnnnnnnnnnnnnnnnnnnnnnnnnnnnnnnnnnnnnnnnnnnnnnnnnngttatcaagtgtccccacgcccattgggaagggagtttgatttgtaatggtgtgtccgagggtagacgtaatcaacatattgcataagtgcagctagaggaacggaggaacagcagccatcccggtataagagacggacaggcgaccggcgatgtcggccagcccccccttccccctcatatgatgatataatttttccttgctccatgttgaaatgctttttgttcttgctctcccatcactgactccgtcaaccaagcaaacaaaagaaaatgtccaaaaaatatcacatcacacacatacaaaacaccaaaatatccacccattataaacaaaccagataaacccatttcctcagaaaacacacacaccccctatctatatatctaatacagaacccgggtaagaatgcgtgagctgagtccgtccaagctgtcccgaatctccttgatatcctccggccggacgtcgctaacatcggccatgaggtaagcaatgtcgcccttggagtccgaaatctgcttgtcgacgttgtggtcgcccaagatctcgttcaccctgcgcagcacaccgggcacgttgcgatggatgtagatgatgcgcgcgtggttgctctcgtcgagggtaagctggcgcatgttgacctcgggcaggttgacgctcccaagggtgacaccctggttgatgtacctcacgagcgcatccgcaacctcaataccaatcgccctctgcgcctcctccgtgctaccaccgatatgaggagtcaaaataatgttgttgagaccgcggagctcctccgcccacgggttcaggtcagtggtgaagtaatccccattcccagccggctcattaggatagacatccagcgccgcaccagcaaccttgcccgccctcatagccttgatcagcgccgggatatcaaccaccgtcccacggctggcattaataagataagacccattcttcatctgctcaaactgcttcgcccccagcatgttcttcgtctccggagtctcgggcacatgcagcgtgacaaaatccgcctccccaagcagcgcctccagcgtaggcacctgcctcgcggtaccaatggccatcaagctgaccacgtcatagtaaatgacattcatccccatcgcctccgccaacaccgacagctgcgagccaatatgcccatacccaacaatacccagcgtcttgccacgcacctcccagcacttggcgctgaccttgttccaagtgccccggtgaagctcattcgagcgatcgcccagctggcgggcaagagagataatctcggcaatcaccaactcggccacactgcgcgagttggcaaagggagagttgaaaacagcgataccctgcttggcagcataatccagatcaacctggttagtgccgatgcagaagcagccgatgacgagaaggttcttggcctcctggagcaccttggccgtcaactttgtctttgagcggatgccaatgacgtggacatctctgaagtgtaaatgtcagcaaatttgaagccggaataaggacttatgaggtggtagtaatagtagtagtagtagtagtagtagtagtagtaatagtgaactcacctaatcttctcaatcaactgatcctccggcaacgaagccttgtgaaattcaacctggtacccctgaccagacagaatatccctcccggtctggttcacattctccagcagcagaatcttgatgtcctccgtgctgaacggcttgagctgcttagcagcagcgcgcaacgcaaggctggccatgaagctgctcgacgcgggtggtgagtggaaagtagcggtaggggaaacactgaggctgttggacacggcaggtctagccaacgaagactgtgagattggttttggggttgtcattgtggcagttttccttttcaactggcggaatcaagaaaaaagatattgactcaaaaggcggcggcaacagggaacaggctttgtaacatgggctaataaagcttcttcgcggtcagaaaaagttgggtaaagttttgagtcgagattgaagaagaaaaaggtcccccgaacaaacaaggcgtgggatgtgtcacctctttgaatactcagcccgtggttcaaggtcgatccacggtgggatggttccatggtggggtttcttggggatggcggggttgactcactgtgtggtgggttcacgctggctaaaagaaaactttttgggccatccatgacggaatgcgagttcttcattcgacaagcccacacctgcgcctccgatcaaggcgtgctcgccctgactacgtacctactcactctagactatactgtacgttctatagaacacccaatggctctcttttggtttattttcggttcccgggcccttcacgtagcatacctctttgacaaaatggaactatgttatccaacacatccatagacactacctcgactctttgtctcttgtccaggtaccaaaagtatagcatagcacttacatccagggtctaccaccaatggttgtctattccggtccggataccgggacattcctggatctgtcgaaacaccaaaaatggaacaatcgcctcaatgtatcacctaattttccgggtcaagaggcccccataccaatgaacattcaccccgcataatcgccgcatatgtacggctcagctgcacaccgtgtgccggggtcgcaatgagtcgacttcgatccgacatcctgggcccgctcagcagcgactacggaggccctcagatcagacatggacaaaataaaagacacctcatgatgatcacgatgttgatgagtttgctacataatgtgaattcactgcctactgactgctgggctcaggtgccataaacctaataccaagtgttcccatacagtgctcgagactcgtcctgcccccagttgtgagcccccctttttgtctgccttctagtatgccctcacatctcgggaaaagacaatcgcttcccacccgcacaaatgaaaattgaaaaacccataaacaaactgagacgaggagaagccatcaaacgcaaagggcatgcaaagacaagacatattacccggaaatgtcctcaaaaacaagtacaaatcagagctcaatttcggcactcctgcatgtccatcattcgccgtattgctccctaatggagcctgctgatgagcagtgtaattgggacaccagtgaaaaaaaggcccgggtagagggcggaggggcgattgcccgatcaatgaagtatgctaggccatgttggcgagaagtctacaccatttagctttgcttgcactccgagggctcctgcttgggcttgctgccatcctcctggaaagctgtcagtctttgacctttgtctggtggacaaaattgattcttacctcttcctcctcggactcgtcctcatcatcgtggtcctcgctgtcatcgtcctcgtcatcctcatcatcgtcgtcgaaatcggcatagtcctcctcgtccaactcctcgaaagcgagggcctcgccggtgaaccagtcgatggcgcggggaataagcttctccttgatgtcctcaccgagctggtagtcgagctcgagacgctcctcaatatcctcggccgcctcgtcgtcgtcgtcggtggggggcttggggggcgagaagaagttgaagaaggactcggttgggacagtcttcttaacgatgcgagtctgcttcgtggctggtttgtgttagaaaaaaccccaattttacacgagttttcgccttcaacttactcttgttacgttgcttcttctgttcgatgcgaacggtaagatcctgaccggccttccagtcgatcttgtcaccctcggcatggtcataaatgaagtcaccgccatacccgctctcgttctggtagtagtaggtcttggtgatgatcttgttggtgaaaaactcgttctcagcgaactcgaagatcaggcggaaaccgggcttgtcgaggtactccatgcggatgtcgatcagggacttgagagcgccctcatcgcggtcggtgatcatctcggcaagggagatctggttcttcatggcagagagccagaactcgggaataccgctgaccttaccgccgtcggtggcgcccttgttctcgacagcggcgccctccgccttgtcctcatcctcctcgccggccttgacgaggtcctcggtgggctcggtcttgccgttgacgatggcggcacgctgctcatagagaggggtgaacttggcgaagaatttcttctcgagctgaaggacctcctcctggaactcggcctcgagcttggagtgctctttctggatgcccttgagaccggagacacggcgcttgacctcggcagggagcgactcaatgtagccggaagacttgccaacgagggaaccgagacggccctggatcagagacacgaggcgggggtcgtgagcaaagatggaagcggcagtgacaccaccacccagatcctctgcgtcatgcaaaatggtcagttcatgatcacaagccaaatcttgttgggccgcaacaacggcggggtagatgggggagatgaatacgaaccttcattgatgctagcaactccgggctgctgggcgtgcgatgagatgggagctgcgttcaaaggtgtgttctgaggagtgctgttgtcgacgagtcgcagtcagtacaggacgggcagggcagacagcttatcgccagtcggccgggggcagtcgaccgactggcaagcagacagaatgccgagaaaacttacggggcaacggcggggtcgggccgcttgttcttaatcggttcggccattttgattgactgattgtgatgatggacggggatggggatcgtgcaaacagcggcaccaacaggcgatttgtgagggcagaacgaggagaaagaactgcacggaaacagcgggtggtgaagcgtcgacagattgctcagagccggaggaaatgttgagggaggggaaggaaaagctatcaatgggtcactaaaaaatttgcggggcaaccttacgcctctgcctcccaccggcctgtgcggtcactgggcgttcactgcctgcacccaacactcacagtggctctacgcgtcttttttccctcttttttactgggcgtggtctggatcgcgatggcaatgttcctaaccgttgctttctccaatccgtgaaccgaagcttagcatgcctcacccatgagtcgcatctcgaatctccacaccggaccacagccatcaccaagggccctcctagttgacgtggcagccgtggcagcctcttccggctcttgctaatgctaggtagcagaaatttgctttggtttcttcaccttcaccgctctctgcggccctactgtcactcactcatcttgccctttgtcagagagcatggcatgtcatggcatatcaccagcctatctagggcttcgccatccatccggccccgtcaaagtttccagggatggcatctaaattttctttcgcctcccacctcccacctcccacttccagcccaccgactttccgtctccacctgtcaaactcgcttttacttttgggagggaccctttgactcctcatccgaagccgatgattacacagcacagtagacacaatgaacacacgccatcacagacaggtcttgtttctgctgcatatggacttttgacaagcaaagtaagtgtattgtcacaaagtacatatgtcttctaaatcgatcgggcgatatcaatgatcacgggatctccgggaatttcaacttagttacccgtgtgggcatccttcagatgactgcatacttgcagatataatgccaagaggccggtagccagccaacactcaacatttacctgaacaaatggtgttgagggatgacagatggatgtcggctacggagcatcacggaagtccaatgtctaccgaggatcccgttgctcgccaccttttgcaggattcgtgcaaggtagccccaagtctgccagaccattgttcatctcacgatgccagctacacatatgagcctcaagattccctacgctgttggctggcatatttttaagcctcctaagtaatctttgagccaagaaccattgtagttttgtctgtggacccccacttacacaaccaaaagaggaaagattcttataagcggtacggagaatagtgtatgagcaccacattggaacacactcccacacatctacctagttacccaagaactgatcggcgaatcggtacccagagtgccaaaggtcccaaatattgactttgaagcctgaataaaatgcagggacacgtctagtggcaccttgaggcatatgcatggagcagacatgcaccccatgacccacatgaaatgtagtatgattctgcaactagacacacaatgttccatgtcatccaacatacaagctatatatccagtagtccatctgactacttacttgacgtctattaatctttaggaataactacatcctccgcattttgtatgaatggtattttaggtcatcaagagtgttgctggcctgccaagacgcaccatgcagctatccgagtagatccaatcgagtccgacgtcatggtgcttatcagaaccagctccacaaccgctctgttctccgtacctgaattctagcttcggttcatccatttcacccacgcgctcagctataccacggccaatccattggcagctgctgttgacaatgcgcatgcgatcaatttttctctctccagaaccttgctgaggatctatcagctgccttccgctttataccccaaaccaacatggaaaacgaccgagatcacgatctgccgccggcggcaagcaaccgaaatggcttttatagtctccaaggaaaccacagcagcgtcagcgttttcgaggatgttgagatggcgcacgatgaggtgagtggaaccgtgcacaatccaagcctgcggcagtggtactaaccacacacatagctctactcggggccgatggctgaatcgttacccacgagtgtctctgcctttcatcaccgccgctcacgagccgattccacagcaagcttctcattctggcaggaagaagatgaactgaatgacccccttgcgatagaggagcggcgcatcggggatctggacgagctcccgttcgacgacgaactcgacgaggaacaggactctaccgacctcgaacgaaccgccgaggaaaacgattacgtcctccatcggcgcgcatccatgcaatcccgaggggactctgtgcacagtatgttgctacgtagggacagtggcacatcggcagggagtggatatgggtcgaatcgacacagtcaaaaggcgcatattcagaatgaggacctctacattgcgatcgccgggttcagaaccagtaaaatcggctatgctctgtaccttttgatatgcgtattcacgttgggggtagggtggctaatcttctactggtcgccaaagtggcgagtcaagctggttgggaggtccgcgctcctcagggagtgcgagtgggtggtggtggaaaactcgtggaacgagatgaccgcggtggatgtggtatcgaaggagtatgggaggacgctttcgacagtttttgggtcgccttccaagttcacttcgtacctcctggatgacgatccagatccaattcttccggaactgaggtacatagactatcgccacattcgcttcttcttccaccctgtgcgcgacaaatttctcatctgcaatggctggaaggatcccctctggacagatgtccaagacgttcgcaatggtatcgacaacgacgagcaggtcagccgtcgcactgtctttgggaaaaacgatatcaatatcgaaaagaagactattggccagctcctcgtgaaggaagtaggtttccccccatatatgtgaattcgaagaaagcccggttgctgacaaagttcaggtctttcacccattctacgtgtttcaagtcgccagtcttgtcctatggtctctggacgaatactactactacgcttgcgccatcttcttgatctcggccatttctatcatacagactttgatagaaacacggcagactgagaggagacttcgggacatttctcggtttgagtgtgatgtcagaatctgtcgacacggcttctgtaagtttctctcctcttttgaggtcaatgggcacttcttgcggtattctagcgcagcatcctctttgccacatgaccacagaccatttctagtccgtgatagccgctaatacaaccccagggaacacaatcctctcaagcgaactagtacccggtgacgtctacgaagtcagcgaccccaggttgactcagtttcctgccgatagcatccttctaagcggtgactgcattgtcaacgagagcatgctcacaggagaatcgatacctgtaaccaaaaccccagctacaaacgacacgcttcagaagcttgatttgaatgctccaacaccagtagccgaggtggccaaacacactctgttttgcggaaccaagatcatccgcgctcgaaggcctcagaatgaagatgaacaagctgttgctcttgccatggttatcaagaccggcttcaacacaacaaagggtgccttggttcggtcaatgctcttcccgaagccgtctggcttcaagttctacagagattccttccggtacattggtgtgatggccattgtggcagctgttggtttcttggccagtatcgtcaacttcattcaccttggcttggcgtggcatgaaatcatcattcgcgccctggatctgatcacgattgtggttccaccggcgttgccagccaccttgactattggcaccacctttgcggtgcgccggctcaagagacagaacatcttttgcacgagcccgcagagggtccaggttggaggaaaacttgacattatgtgctttgacaagactgggactttgacagaggagggccttgacatccttggtgtgcatctcgtttctagggacaccaacaagtttattgatttgattgagaatcctgatgatttggcggttggtcatgaccagccccctgctgtggggggtaagcctgacaccaggtcgacggcgctttataccatggccacttgccatgcgctgaggaagatcgatggcgagatgctcggggagcctcttgagctaaagatgtttgagtttacaaagtggtctttcgaagagggtgacctgggtggtggaagaggggatgacgaggagcaaggaactctgaagccttcaatcgctaggccgcctccggacgcgaaagctgatggcactggggaggcatcttctatcgaactgggtgtgctcaagtcgtttgagtttgtgtctcatcttcgccgggccagtgtcattgtcaaagactttggcaagccaagcggagacatttatgtcaagggttcgcctgagtgtatgagggagatttgcaagccagagacattccctgaggactatgacgaggtcttggggcagtatactcgcaaggggtacagagtcatcgcttgtgcctcgagacatatcaagaagctcagctgggtcaaggctcagaagatgcacaggcatgatgtcgagtcgaacctcgagtttgtcggcttcatcatttttgagaacaagctcaagcctaccacggcggcggtactcaaggagcttggagattctaatatcggaactgtcatggttaccggcgacaacatcttgaccgccatcagtgtggcgagggaatctggcatgatcagcgagacggcacattgtttctacgctcggttcgcaacagggcacaccaaagaccccaacgccgagttacagtgggagagtatcgacaaccccatctaccgtctcgatccccgaaccctactcccactaccggctcctccggaaggcgacgcctcgctaccatacgacatctctaacatgaggaattactccatcgcagtctcaggcgatgtcttccgctgggtagtcgactacgccccagcagaagtaatgcagcgcatgctcgtcaccggcaaggtctttgcgcgcatgtcgccagatgagaagcacgagctggtcgacaagcttcagagcatcgactactcgtgcggcttctgcggcgacggcgccaacgactgcggcgcgctcaaggcagccgacgttgggatctccctctcggaagcggaagcctctgtcgcagcccctttcacctcgcgcgtctttgacatcacgtgcgtccccaaagtgataagggaaggccgggccgcgttggtgacgtcgtttgcctgtttcaagtacatgagtctctactcggcgatccagttcacgacagtctcgttcctctacgcgtctgcttccaacctgggggattttcagtttctgtatattgacctggcgttgatcctgccgatagcggtgtttatggggtggtcgaaaccgtacccggtgctgtgcaagaagaagccgattgcggatttggtgtctagaaaggtgctgacgccgttgatgtgccacatggtggtttgtgtcggtatccaaacggtggcgtttgtgggggtgagggggatggaggggtttattgcgccgacgacgccaaaaccgggggagaagccggatgtggagaatagcgaggtgacggggttgtttctggttagttgctggcagtatgtgcttgcggggtgggtgttgaatgctgggaggccgtttagggagggggtggggaagaattgtgagtattatacattcccgggggagatgaaagggggtggtgatgatggctgacaatgatgatagggccttttttggtcacgatggcgactgcgttggggttgaatgggtttatggctgttgcgccgccggagtggattgggtttatgaggttgacgaggacgagttgggagtacaaggttgtgtttgtttttgggttgggggcgggggtatatttggggttggcgtgggtgggagagcattatgtttttcagaggttggcggggtgggttgggcgggtcaaggggtggctgagggggggggagaaggggggtaagaagaggaaggagtacaaggttattttggagaggatgaggttttgatgggtgtaagggatggaatggggtgggctggttggacattggagaatggggagagctaggtaggggatgggtatgactatacgaggatatgtaggttatggatggatagacatgagtctttttgggctgggctggctggcgttggtaaggactgggtcagctggcgttggtaaggactgggcggaaacgtgtggcaagagatagaggatatacagacttgtagtcaaggtctcgagcgaaagttgaaatatgtttgggttgtgattggggtgggtaggtgggtgtgatgtgtgtgtttgacaagtagggaagatgtgtctcgttttgacatggcgggtttctccgaaagtattgagaaccagtgggctgtataatcttgctacttagagattaacgtataatatcaactgaacagcaaacaatgtgactgttaaactgatttaatttggtatctccttcctctcttgctcttggcttcctcctcggcctgttgtccgtccgtctagttgggtctgcgttattgctactttggcgcctgaccatgtatctacatttatttctcttcaccacctcgtcgttttcatatcctcgatgcgagtcgtttagtgatcccaggggtgcttccagccgagaaggacaggtcctgttcttcttgtgagtaacactgttctggctcgaggggtagagctgagaaagacataccgtcctccttcgccttgtaaaagatccagaaccacatggaagctcccaggccggtggcggtatagcggtagaggggccggatgggggggccggcgagttgggagcgggggagggctcgggagaagcgggcgaacatttttggttttttttctttctctgctggatggaggagatcaggtactgaaggagacaaagcaattgaatagagagggacaaactcacgctggctggtggcagacggggaaagaaatgggtgggttggtaggtgtgtcgcgatagagcttctcgagctggctgtgtcgtcgttgcgccgattgcttgccctctcagtgaccagggttggggtacgtactctgtatctgccgtcattgggcgtgggtgcctgaagaacaaggcagaaacagccaagaaatggttccagcccagcaaggtgcgtctgtcatttcttggcaggcatcggcagcgcgcgctctcggcttaatcttggtctcttgcccgttctttgctttcttacaaccttctcttcttcgtcacacttttagaaagcagcaaattgagaggataagagtatttcggcagcgagcttgcagaaactggatcaaacgtaccactctggattgacaaacggccttgcgaagcaatccaggcgtcagcaattccatcagtggcagtcaactgttccactgtcagttcaacaaacgaaagccttatccagaaaccgccgataagatattcttcgtccgacaaccgccatcaaacacgaacaaaacagttacaacggcgcgatgagcgcctccgagtcgcaggaggctgcggggaggccgcaatctccccgcagctttgccattgcgcaccagaggccgagaagcagctttgtcgggtgctccaagattgccgactacgaggtgttggggaaactgggcgagggtacctttgggtaggtggtggttcttttgccttcccatcttggccgtgtccgaagctgacattgttgccctacacagagaggtttaccgcgcgagatcgagaaagacgggtgctttggttgcgctcaagaagatcatcatgcataacgaaaaggatggctttccgattacggcattgagagaaatcaagctgctcaagctactgtcgcatccaaacatcctccgactggaggatatggcagtggaacacccgcccaggagtggtgagttgatgctatctgtcgaggaggttccaggacatgcatggctaacaggcgccctttgccagcggacaaacgaaagcgacccatcatgtacatggtcacgccctacatggaccatgacctgtcgggcttgctcgacaacccctcggtgacattgaccgagccgcaaatcaagtgctacatgcagcaactgctccagggcctggagtatctacacgccaatcgcattttgcacagagatatgaaggctgccaacctgttgatcaacaacaagggcattcttcagattgctgatttcggtcttgcgagacactacgagggcaagacaccacagcctggtcacggcggtggggaaggaacgcgtgactacactgctttggtggtcacgcgctggtaccgcccgcccgagttgttgatgcatctcaaaagatacaccacatcgattgacttgtggggagttgggtaggcagcctgtggtcggttctttgttgcaagggatcatgctgacaatgtccctaggtgtgtttttggcgagatgctagttggcaagcccattctcaccggcgaatctgatgggcaccagttggagttgatatgggacctctgcggtacgcccaccatcgagacaatgcctgggttgaaagacttgcctggagccgaagcgatgtcacccaagccgcgacaaggtaacctggggcaaaggttcagagaatacggctcgggtgccatctcgttacttcgagagcttctcaagctggactggaggagcagaatcaacgctcatgacgccctgcagcacccttacttccgcaaccccccatatcccgccaagccagaagaactgccgtctttcgaagaaagtcacgaatatgatcgtaagaagtaccatgagaaaagaaccgtgttgcctccagcgcccaggggcggtaccgtgggccgcggtcccaacaatgacggcgatggctacaggaacagcggtggccccggcggaagaggctatcctcggaacaacaacaaccgcaattttggtggtccggccccggcaccagacgagcgagtgcccgcttggcacagagacaccaggcttccaccgcgcccacctccacctgcagactatggcaacggccgtgatcgagctcctcgtggaggtggcggaggaaatcgtcaggacgtcgatacgtatatccccagttatgatagggacgctccaagacgagacgatcggcggagggacgacaggcgagaccgcggaggcccaggggacaggaggaggggggattatgatgaccgcacaaggagcaatcgcacgcgcagcagaagtcggtcacctctgccgccaagagaccgcgatagggacagggacagggacagggacagagatcggccacctcgcgatggtccaccgcatcctagataggttcagggtcgcagaggccaggagcagggatacggacgtaatccccgtcggtagggaggtgggaataccaaacggggctccaggcgctcgggggagaatgagcaacccagaccggggtctggcggtcatgagcagaggcctgaggggggaggggggttgggtggctctacatcacgggctggacgtcaaagcaatccggcaccagtagcaaacaggaggcgaatcccattgtacagtcctgatagacctattccatcgattgaagcagagccgctagcaccctcacaattgcgcccgtcacgctcgccgtcacgctcgttgtcactcaactcatgcaatcgacaattgctcgtccaagcaagcggccgaagccgatcttttgcttctggtgatttttcggatccggagctgcctgcagacccaccacgtagacaatctcttctttctcgggtcgttcagcctgaggatgtagttgagcaagcacccgaggagacagctgagcaaccatccgaggacgcagcggagagaccacggcagcgtgttaaattaccgcctttgccatcaccgctcggatcgtcggtcgaaagacttcttgggctgagaacagccagtgagtccttggatctgagtctaggaacaagcagggctcgggctggcatagccaggtcgagggtgctggctgatgaggacggctcgtccgcagtggtgactcgccctcgttcgcatcagcatcatccgggaggcggaatcggggatgtttaggggggtgggttggagacgccggcatagtcaagaagagattgagcgggcggctagggtgttgggtatgccggtgccggtgccggggtcaaggggaagcagtagagggagggttcttccgactgatggtgggtgggagaggtgctctacgtcgagttcgggagaggtggagagtacacgaccgtcggtggtgccgccgcggagaagtgggcagagaagaagtcggaggccgggtgatggttgggaggcggatgatgagttgcggaaggggtcgggagagaggtcggaggaggaaattgcctggtcggtggggcctgaggaacggccgagcacaccgccgagggttgggttttgtgagggtgagggtggtgaggaggggggtggtgagcaagaggggagtggtgaagaggatggtggtgagcaaggagaaaagggtggtgatgataagaagagaaagaggtcgaggtctcctggcgggtctgagaggcaaggcaagaagagaaggagggggtcaaaaccaccgtctgctgaagcgtctgaggagtcagaggttgacttgaatgataatccgtctgctgaagcaccagaggagcggtctgatgtcgaaatggatgatgaggaagttgatgatgaaccggctgaggagcaggccgaggttcaaatggatgacgagcaaactgatgatgaatcccctgctcaaccacaagcccctcctcaagctcaaccccctcctccacctcaacttcctcctcaaccaagccctgtcacgagacgatcaacaaggagcagtaccgcacgggagcctggtttctatgctgaggtaaacacgagcactgggcgtaagaacagtagtagaaataatcactggcgcgggagattcgggtgattaggatatagacacccagaaaagcgtgaattttggtgtggcttgcagctggcttctggaatttggtcaacaagcgaggagtattagtaatgtgtaaaagtcatgtttggagagggttttagatgcattctgaaagtgtctgcgtgtggttttcttcagagtaagttcgaaagaacggaggagaattgcatacttgttttcaggttgtgcagccatttcaacatcgtgttcagttgtgaatgtaaccttgtgcgatactggtgctgttgatgttatagtgaattctctcgcaagtagttacgtctctgaatgaccatccccagccccatcacgtcacaacaaaaactcatcttcttccatccaagtcagaatcaaattactactacgcttttaaaaccgaacctctgtatcaaccacccctccttctagtccctcaccccatcatcaaaacaacgaaccaaaccacccttccgtctcctccaccctctcacgcacctcctcctctttgtcctcttcactctcacccccagccccctcctcctcatccgcttcatactccttctccttcttaatctccttacttaccctcctattctgttccaacattgaaaagggcttatcccgactatacccccgcttcttcttgttcttcttatccacatccccctcatacgctttaatctcctcagcttcctttatcttgtttaatatacttgtcagttccggctccgcttcctcgtcattcttgacaataatctcttccctccccttcttcaacctcttcctcgcgctactccccaacttcttcttcgtggcagtagtctcactctccacagcaacatcctcccccattaaatacttcaaatcatcacccccaaacccctcaccctgaaactcattcttccccttgaccttcttcctcttctgcttcttcttgttcctcaccccttcccccttccccccaccagcttcggtcccagcaatatcactctccctctcatcccaatcccccctctccttcccactcccctccccctcaacctcctcaataacccccaaatccaacatcgccaacccagcctcgtcgactctctccttccaccccatcccccgtctcgtatcgccatacatcgtccccaccacaaacggcatacccttcctcctttcaaactcccactcctcccaccacccatcccacctcctcttgtcctcccccaccgtcaactgtatcctcctcctcaaccacctccaatccacccccgtctgacgacaaaaagcctgctccgtatccagcagcaccgtccgatgcggcgccagaaagcagataacatcccaaatcaacgccggggcaaaatgcctgtagccgatcgccacaaaatagtacagcaccctcaagacaagtaaaaacggcgtggcgacaaagagcaaaagccggagaagatacctcagaatggagccaacaagggaaaagacgccgaggaggtaggaaatcacctagtatatgacgaggaggagtgcaatcagtccaacaatcttgtgctacgctgatgattcggacgaggaagaaggggagacgaggttggacgaggattcctcgtggatcgtctctgtcagtaacccctgaagccgaggtttctgagggcgttgcttgatggaggcggcggggatcaaaaagttggcttggttggaggatgacatgacggctgttgtggcgctgctgtcccaggggtcgtcgtcggttccaaaggatagggagctggtgctgtcgaccgagccgggagtaacggggaggtccattttttgctgtttgtatgtcatggcgcctggaggtttgttgggggtggcagtccgcttaggggtgctggtgctggtgctggtgctggtgagggctaggaattgttctgtgatgaacactatgagggcgccggttgtgaagcctattactgctgcgtagaggagctgacgatcaagtcagtaggaaccgtcagagatgcataaggatcacgtaccaagatgggcaacggcttaagctccagaaagatatggattacaatcccgaacggggctgtcgccaagttgaagacggctctagtaggagagatgatgaagaatgaaatcacactccagattgtctgcaaactccaaatggtgacagtcttggtaatcaaccaaggccaatacaaggtaccgaagatggtcctgagcagcgtgagactggttctctcggaaacgggggcggtggtgctgttgacgagaacagtgagagggtccatagtcgagctaccgcagatataaacgagtgttggagttgttgttgttgttgttgttgttgtggtggtggtggtggtggtgggtgaaatgctactggatacttcgcgggggcatcttgacagtggaggtgacgggagatgcagtgtaagcggctgcaaggtgttgaggcaagagcgactacttctcggagtccattgctggtgccttctcaacagcgacggcgggatgcaaatgccatccgaaagtgcaggcacgatgggtgtcatgtgtaagtgtgatgtccagagcctccttccttggaatgcatgtaatcatgggtgatgatgcacgaccggcagtgacgggacagggggggctcctgggcagtgatgcaggggagggagaatgaattgtggggcagggccaaggtaacttttgagaccccggtattagcatatcgatttgagcttcacatcaaggtttatgaagtgaaccttgaattcttattctcacaacgacagaactattctgaaacctacttattcaaagcaggaaattcatctgaacatttcactctcagtagcttaatcttctcagcaaattgagatatatcaactcttctcaccagcgactcaacccacactcacaaacaccagcaacatcaccactcaacttaaccaaccaccacctataaccaccatgaccgaagcaatggatctcgacccccctccccccaccagcaccacctccctccccaaacccaaaacctccaaacccctcctcaccaccctaaccctccccacaccccccttctcctacgccaacctcacctttctaaccccctccccctccacaacccagcaacagctcgaccccctcctcctgaaatcctacctaacctccgctttatctcaattcctcggccaaaccggcgccgccatcccaatcgacatcctccaagtcggccctgcctcctcctgggtccgcctcccccgccccgacctcgccgcattcaccgcagcaatcgcctcattcagcggtctaaacaacgggaaagaaaaactggtgctcagagtagaggcagccggggatttcctcggggctcttgtcggcagaggggaggaacgtgagatttggggaaagtgatttctctttttggacaagtttgttttgttcacaaaaaagtgggacggcatatggatagggcagacagaaaggaaggaaacatttttgcggaaaagggatggcagaggttgctgttggagttgatacccaagttatagaggcggaaaacagggcgggatgtttacgagggagaaaacagaaaactgttctcgttccaaaagatctgaattcgatttttttctttctttctgttcggacatgtttatgatgtcatatagcgagaatatcttcttgccagtgttggttttgtccaccatcatcatacattggatatcataccacccggtcaccaccaatcaaccagccacgaacccctaccgccctcaaaacgccatgctaatgatgctccccaatttccttgcgtgagcggagccagtcttgtcttcttcgtacatgcatttattctcgactgcaacttgtcgcttacatgagcgaggacatcatgctcgagttggcgtaggcctgcgagataaaacgtcagctttggtgtgtggtagggttgggggaaaggaaaccttaccatcggccggatatttggatgaggcacggcatcaaactgtgtgaatctaagcttgagatcggggccgatattgatgaaggcgcccttgttctccgtcatgtcgcagtacttgggcgcggagaagactggattcagtgttaacataatgtcggtaaagagaagggttgagttgaaacataccagtgatgcactttccatcatgctcctcctcataacccgccatcctgacctcgtgcgatctaataaccgcctccaacccgttcttctcacagaacctcttggtaacgtccggaccgaactgcatacccacaccacgcttgcttggtccacggccgggctccgactgaggatctgtccacaacatctccatcatcaaaccggcctggccgggctgcctctgcttatgcctgtcgagcttcctgatatcatccagcgttacgttgtcgtctgagaacaaaccgccgtgcagaacaaagtatttcttgccaacaagtgttgccaggggcagggcagagaagctctcagagaacagcttgaagatcctctcgttgtacttggccttgcactcgccctcgaagccgtacactctgttcatgtcgtctgtttcgtggttgcctcggttgatgaagaagttcttggggcggagccacttgttggcgtagagaagaagggcgatttcggtggaccacgagcctctgtcgacaaagtcgccgttgaagagataccagtgcttgtcgctgggagtgccgtttatccggaagagttccataagatcaaagtattgacctgtatttggtcagtgcctgtactcttgatacgataccaaagaagaaaacctaccgtgtgtatcaccgcaaactgtgagctcgacatcctcaggaatctccacctccaccatcgtaggctcgtcatacaccagcttcttgaccgcaatgacaatttggtacacatatttcttgtgtatggtcttgccgttcttgaacctctccgtcatgtcatcgataaactcttgtgtcatttcactccctaacctcacaccatcatacgagtcttccacatgcatcgagtcgacatcgagtccgtcagcaaccgatggctcatccccaacctcgatcgcctcgaagaaggcaagttgcctgacggccttttggcactcgacaagcttgagcttggcatccttattaccagggtcgatcttgacacaggtctgaaagtccttgacggcctccttgggcttgaggatggctacgtaggcggtggctcggcggtagtaggccttgatcatccctgggttcagctcgatggctttcgtcgcgtccctgatcgcatagccgtaggcttctgtcttcatgtatgcctatttcacataccaagatgcataggttagtaaaacaaaaaaagtggtgacgtcgggttcctgaaagctacccacctgagctctgtttgaccagaatgttggctccttgtcgttcagctcgatggcctgggagtaaaagtcaatggcggttggccagtcatgggcggcaaaggccttgtttccctggttcttcaaggccacggcctgctcctctggtgtagccatctcgacgtcctccttttccggttcgggctgcgcttttcttgaccacaggaacatgcgcggggttgggacgaatgggtgacagggccggaggttttgtttgggaaagatagatgtatatctaaaccggccgctggtgcttttcggagagagagaataaatccacggtggcaagcttgctgaaacgatagtttcttctgtcttgcgggaagcgcaaatagcaatgaatcggaggtgccttgaacgggtcgctgcgtgcggttgagacctgggcgagatctgcaggaccccgcagtatttgcttttaaacggtactagcgtatcatcttatctgatgggtatcgagaggcggagtttaatgtatctggggtgctctagcggtttcttgcttgtaggagcatcatattccagacccatcttcccgactccgccatctttttttgttgtactttgtgctgctccctccgactttcaagatgttgactgtatgtccacgtgcttcgccccgttacagtaatgctcccctggtcgacccaggttgcaaatcaaatgacaggatagctgaatatctatcaaggtgcaccaggggacgtctcggcaatcatgcatttgcccttttgtcattatgcgataaacattttgattctggccactagccttggcgccgacagtcgagtacgatggcaaggagtcaaaggacccggtagtctggtttgtctggggagccacgtgccggtcaacggctaggccggtccagttgtggcctggtcttgaccatgaaagtgacaggacgggctcccgtgcggtggcctggagccaccttagctggccggttggcgcgccataccattgtctgtcgggtctaataattacattgtctgtattcgctggtgaaattctccaagaccagatatctccaacccaaggaccgttgacaactccgtccggtttttgaaaggattcgatataaaaacgccgcgccctatgcatgaaagaacggaatattaatatgttccctgtcacctcgacgagtcgtctgatgaggactcgtcgctatcatcgatgaaaccttcctccaagctacgaggtgttagcataccatcccaagacatcaaagggccattcccgcttactctctgcttaacctcctcgagctgtcaatactgtcaccaatgtttccacctcttccggtagactcatccacatcctccagctcttccccgtcttctgaatcaaacgacggccgaccaccaacaacgagccgatcagcaaagcctgtgctccacctagaggtaaatatcaggctactaaggccgcctgttatcctggccctgagcgaagatgtctgttcggataaagtgtctattgggaggtactggctgtaacggtttcgatagcgttgccacaaggggtagaggacaaacgtcgacaggaggaagagtatcagcgatattatggcggggacaaccagcgtctgggagaaaaaaatcatgttagtacatgttcactgcgaacttgttctcagaagctgacggatatctggataccttgacggctgagaatgtggctcccatggtgtggaggtgttccagaagcaacagttgagattcttcggagggtgagctgcgtcgcaaagtctgagtgtcaggatgctaatgataaccactccagttgcatacatagaatgtgcccgcaagaggcagcgaggctctgtcaatcaattaatccacatgtcagaagcaggacggaaacgcgaagccttgcttgctgcacgtcaacgagctccagcttggcactccgattattgtggggccacggacaatcacccgcaacccaccgtgcccacccaacccacagtggaccctacccgtcagcggcggcgcccgcttttaagcagcgagggtctgtctgttctggcggttgatgagatccgatatggatgtctctgcacatgctgaggttgtgcaaactactcctaatatgtctccaactagcaccatttcagctgccttgaagacaatggtggcggcaatgatccccatgcccatcggaggctcaggagcaaacgtaccggtggccgtggacaacttatcaggctgatctaccacggacacgtcgtggtttattaccgcgcccgtctttgggcatctttggtgttctagttatccactagaaagcgggatagcgactctaagaccaccgttggaaatgagcaccccccgtgacaaacggggaccaggaaattgccaacaaaaatagacgcctggcggggttacctacggagtacctaccttactcaacctcaactgtcacctccggtctgctgttgctgcttgctcctttggggacagagtgatgagaacagactcggaaacagagagcatcaagttgaaacaacatttatccctcgcaaccacgcaacctaaggagggagttggttgaagaaggggaaggaaaaagcgcggggttgaagaacagggttcaccacccacccgcacaggccaccgcatggcccctgtctgaaaatatccaggggctggtttgggctaggccagtttcagaccagcgaaccccctttgtcgacccgtccagaggctcatcggctcatcgcacactcctccattccttatcgattctgagagatccagggtggtccccagcttcgcgttcattttgttatccagcccgacagagagcatcccggaggtgttttgtgttttcgcaggccttgcatcattctttcctttttcaaaagagacacctatcaatgttcctcttctgtatgtccactgcttgaggttcgctgctgctgctgctgctgctgctgttggaaaaagcttaatgctaaacagtgccggtttatgccacacagaaagacaacctaccacccccggctctgcgaatcgcggaatacaaccccggccgcttcccacaagaacatgaatgatgcgatgcgctcttggtttgagacaccgagtccattgacgacgccttccatcttctcccgagccgacccactgctgcctcagcattgatcgaattgctccaagagcttcccttttcccagtttccacatctagcttgcttgagcttcagcctctagccgcaaccgaacggctgtttcacgccgtaccatccatccggcgaacgacgacgacgaccacgccatgtcatcccacgacaaggcgagggcttccagcgggaaggcctcgtccttcttccaccgatccaagaacaaggtcgacaagcgaaccacggccaacgatgcccaatacttggccaccgacaacgacggtgccagctctgtacactcgcgcagctcgcgccaccaacgagagtcctcggtcatctctctcgatcgcccagactcatccggctccggcatcaataacatggccggagtcatgaccacaatcccatacgatgccgtcccgagcggccgccgctcgcccgttcccgtggaatatctcccacaaggcgatcagatgcccattcgacttcaaccgcaccacttaaacaaggccaccagcgattttcatcagtacccaacttttgatacccctcagcatgcttctagtcctaacctcagcacaccgcgcgtgcccgcacacgcctctccgagcatatctaatatcacaatggctaccacaggccgccaggcccaatttcaacaatggggaccgccgcgagagggcggaagttccaacaattcccgctacaattcatacatgacgaccacaaccaggagctctggagacaacgcaagcatcatgtcaggtaatacaggatcctaccatgaccaggcccaggcccaaggacacaatcgctcatcaagaacagctttgcccagcgcctcttcgcagtcttcctttttgtcgccgcactcccccgctcccagggacgcccgcaataccaagttcccgtccggattccagaacagcgacggtttccagtttccaaggcccaccgacgaatcgatcatcgagcaaatgttccttgcgctcatgcaaaaaagaggatggcacaatcttccggaccaggccaaacgacagatggtggcatacccagccgacaagaaatggaccctcatctaccaggaccggcttgccgagtggcagggcgaccagaaacggagacagaccgccaggacaggtcagtatagcaatgttgatctgacccagctgccagacgaagagggaagccccgaatggtacgtgcgcaaggttatggaaaatgcgcttgactcgaagggcttgggcagtttggaggtcaacctgcggacgcagcagatcggctgggtgaagcggtttatcgagtgccagggtcaggttgctttgacgaacgtgctgctcaagatcaaccggaggacggtcaacggcccgactcaggactctggaaagggcgacaagaacctcgacaaggagtacgacattgtcaagtgcctcaaggcgttgatgaacaacaagtttggagcggaagatgcgctggcccaccagcaggtccttgtggccttggttgtgtctctgatatcgcctcggctgacgacccggaagctggtcagcgaagtgttgacctttttgtgccattggaacgagggcaaggggcagctcaaggtgattgaggcgatggacgtggtcaagaatcagcaaggagaaaacgggagatttgatgcctggatgcgccttgtggaggtcaccattgatgggcggggcaagatgggcagcttggtcggcgcgagcgaggaggtgcgcagcggtggcattggcatggagaacctgctgatggaatacgccgtggccacgctcatcttgatcaacatgttcatcgacgcccctgaaaaggacctccagatgcgtgtgcatatccgtgcgcagtttacggcatgcggcatcaagcggatgctgaacaagatggaggcgtttcagtacgacctcatcgacaagcagatcgagaggttccgaaccaacgaggccattgactatgaggatatgtttgagagggagaacagcagtatcaaggacagcgtggagggggaagtcagggacctcaatgacccagtacagattgttgacgctattcagcagcggctgaaggggagtaaaacgcaggattacttcatctcggctttgcagcatttgcttctaatcagggagaatgatggcgaggaacggttgcgcatgttccagctggtggatgccatgttgagttatgtggctatggatcggcgtctgccggatatggacctgaagcaaagcctgaattttactgtgcaaaaccttctcgacaagctgcataccgactcggaagctcgacaggctttcgatgaagctactgagcaacggcgcattgccgaggctgccctggcagagcgcgatgagcttagagaaaggatagcgatgggcgccgatggcctcgtggccaagcttcagaagcagattgatgaacaggccaggtttatcgatgctcaaagacgacaggccgagggtctcaagtctgagatggataacctccagacgctcagagcgaaggaggcccagcgttacgagttggaaacacgcgagctgtatctcatgcttcgcgatgcccaggatgttgctgcttccaacgctgccaagggtagcaagctcggggaggaggatccagctgccatgcagggcattttggatcgcgagaggctcatgagccgtcttcagatgcagcttgagcggcaaaagacggtgtataagctggaaggcagagtctggggagagtctgtgggtccatcagacagactacgtgctctgcgtgaggagatggatggctttggcggtgcggctgatcatcctgacggtcccgctcccagagacttcaccaatagcatgctcggcagtgtcaagaggtcaaccaggataccgcggaaacctcttggacctcgtggtgagcggcaagcgacagaggatgacgtactggaagaggatatcaatgaggaagatgatgccatcattatcgagaagcctcgcctggttgagtacaagcggcctgtattggatcccaagaaggctgctggcatgttcaacgagctccagggcaaggtgcagcgatacgatgccagtgactccgaagacaacgatggcatcactaccggtccctcccatccaagcttggaggcacaggctcctgctactcccagcgacaatgagccgcccaagattcggatcacggacaccacaccagcggctcctgctactcccggcccggctgctggcggtcctccaccaccgcctcctcccccccccccgcccatgcccgggagacttccgggagctcctccaccaattccaggtgctgctcctccagcagccggcggccctcctccgccgcctccaccgccgcctccccccatgcctggcaaactgcccggtgctccccctccggtgccgggtgctggtgggccaccacctcctcctccgccacctccccctcctcccatgcccggcacgggcggcatgcctcctccgccgccaccgcccccgcctatgcctggtatgaagggtatgccggcacctccaccaccgcccatgcctggtggaatgtcaggccactttctgtcccgaaaccagaaccttgctcccgccggaccctctctcggcttgtcgattgttcggcctaagaagaagctcaaggctctccactgggagaaggtcgactcaccactcaccacccactgggccgcccacaccccctcggccgaagacagagaagagaagtacctggagcttagtcgcaagggcattctggacgaagtcgagaagctgttcatggcgcgagaaatcaaggctctcggaggagggcaggccaagaaggacgacaagaagcagatcatctctaacgacttgcgtaaggcttacgaaattgccctcgccaagttttctcaactgtctgtggagaaggtggtgcagatgattatccactgcgatcccgaggttctcgacaacccggtcgtgatggactttttgcaaaaggaggacctgtgcaacattccggacagcacggccaagctgttggcgccgtacagcaaggactggacggggcccgaggcggacaaggagacgcgcgagcaggatccggcggagctgacaaggcaggatcagatttatctcatgactgcctttgagctgcatcactattggcgcagccggatgcgcgccctgtcgctgacgcgcaatttcgagtcggagtatgacgagatcacggaaaagatgaggaccgtggttggggtctcggagtcgcttcgggactcggtcgcgttgatgaatgttttggggctgattcttgatatcggcaattacatgaacgacgcgaacaagcaggcgagggggttcaagctctcgtccttgtcgcggttggcgatggtgaaggacgacaagaacgagtcgacgctggcggacctggtggagaggattgtccggaaccagtaccccgagtgggagaacttcacgggggatatcaacggggtgttggtggcgcagaagatcaacattgagcagctgcagcaggacgcgaagaagtatattgacaccatcgccagcgttcagaggagcttggacagtgggaacttgtcggatccgaagaagtttcacccccaggatcgggtcgcgcaggttgtgggacggtgcatgaaggatgcgaggaggaaggcggagcagatggaggtttatctggaggagatggtcaagacgtacaatgacattatggtgttttatggggaggatccgacggatgagaatgccagacgggattttttcagcaagctggcggggtttattaatgagtggaggaggagtcatgagaagaatgaggctttggagaggcagaggaagttgaatgagcagcagctgaagaggaagaatgcggcgatgaaggcgctgcaggatagagaggggggagggggagggcgtgcaggcttgatggattcccttggagcggcgcgtaaaagccatnnnnnnnnnnnnnnnnnnnnnnnnnnnnnnnnnnnnnnnnnaggaggatgaggagggaaaagggggataggaggttgaggaagggggttgattgtggtgggaggagttttttttatttttattttatttttttttttttaccgcctacgcctagcgccgagtattttgctgctgctgctgcgacggagggggtggagttgactagtacgggggccgggcctacggcgaatgggaatggaagtgcgtaggtgttttgactgctgctgggttgcaaggttttttcgcgttgtacatataacatcatcataccatactatcgtaaccatcttttttttttttttggtttgggatggaagaatgatggtatggtatgttacctactataaaaaaagagatggctgaacgcaagaaataaagggagatgagaggggaaagaaactagtttagctatatattggtgttggtggtgatgttgtagttgggagggatggatgatgagttggaacctggaagcatagcgggcgagcaaagaggaaagaatatgaagtttaatgtgtactgtgtcttaatttgtttgttttgtggtgtcaagagtatgcatgcatgtttgttgtggtggtgcccccaggcaaaagttggtgacatggtgagatgttgagatgtggaaaggggtgatgggtaatgttgaaaggggtgggtggtttgctgagtgtggtagagggggcttgatgggcaatgtggtacgggggtgatgtgaaaggagagcagtgcaccccttgattacctaccaggtgggcaggcaggacttatcgccaactgtgctgctaccttttacataggtatctccaggtcggtaacagtctggctgtacagcaattggggacctgcttgatggaaagagggaccgatgtaacggcattgtgtttgagggcaacgattggcggaagaacagcatcgtttttgctgcttgagagtatttagccgcgagcctcttttcgttcccgtcatggcttgtccccttgcatgcaggcagtgacagtgacagttgacccctcactcaccccaagccggtcgacgacgatgatgtattcttccagaccgtctgattgagttgtcgtccgtagccggatagcggctagatggacagtcgcaacatggttctccacgtggggggatggtctagacagggaatatatacccccaattgatagccctctcctcaaccacctgttatcaccctccattctctttgctctcctccttgccatccatttctttcaacaacatcagcatcatgacctccaccccccccagcccccaaggcctgaacctaggctactcgcacccccaccccttctccctcatttcactttccacccgctcctccgtccaagcgttgctgacctccctcctcgaccccttgctgccatttttctcgccgctgaaatcccgtatcaagtgcccgggcgccaccgcggtgaggtttgatcagtcggcctcggaagtggagggcatatgccgcccgctgtgggggcttgcgtgcttgctggcgggagggggggggtatcatgcggcagagtactgggtgggagggnnnnnnnnnnnnnnnnnnnnnnnnnnnnnnnnnnnnnnnnnnnnnnnnnnnnnnnnnnnnnnnnnnnnnnnnnnnnnnnnnnnnnnnnnnnnnnnnnnnnnnnnnnnnnnnnnnnnnnnnnnnnnnnnnnnnnnnnnnnnnnnnnnnnnnnnnnnnnnnnnnnnnnnnnnnnnnnnnnnnnnnnnnnnnnnnnnnnnnnnnnnnnnnnagagcatcaacccgcagtcaagtcgtagtatggtcaacagtgatggattcggatatcttctatgtgagcttgttacagacagacatggtaagcaccatcaataaattgactattaggtatagttatcgggatatgtacatggctgagaggttcagcagtcctgggtcggcggtgagtcttgtgtccccccctcccttttttttctttttttcttccttttttttttttttgacaagagaccaaaaaggttgataatatggggaacagtactgggcttgtctggcgtttatctgtctcgccgtccccgagacgcaccccttttggacttcggaagaacaagaccactggggtgtgctgcccccggtgaaggctctgcctcagccgggccacatcatggtcagcctcggaacacacaccttcctcctctcctccggccaagcctgctcctaccccatgaaaggcacccacgccaaatacggcggcttcgcctactcgtcctcctacgcctactccgtcccccccgggctcttcacactggagcaatacgccctagcctcccaactcggcctttccgacgacgggggcgagtactggaaaaccagacggctgtcagcctcccagctcaaaacagcaccagatgggaccccgttcctcatctcagagtggaagccttttgtggatgtccacgtcaagacgtatctccttccgcctgttccaggagcgacggagaactaccatttccgggttcatcacatctgggccgagggaagggaggtcatgacggctgatgggagttttgccatctgcaatgagtcgacgctgcgggagtcaaaggggcggtatttggatttgtgggatgagtccaagggggaggggacgagtccaaagctgattgggaattatgatcttgctactcctgaggcgtgggcagacggccaaaagggggcgtttgcggttcataagaccaagggtgcggtcgggatcagggctttggagggcgggagtataaggaaggcgaacttggtgaatgccgaccccaacagcaacctggtcgagagcaggactgctatcccgacgttgcaggggacggtgaagaagggggaaaaggtttggtatgtcggtgggatttatgcccgcccgggcgggaagccagaggaatttctgagcgggtgggacaagattcccgagctgccggggtggctgaaggaggagattgaaaagtcatcttgaggtccgagtcgggtaatgaagttatgatttgaaaagtaacaagaacgctaggtggttgaatgaaccagattatgcaaatatgcaagagatacgtgtgaatccccttgttgaatgctcatgtgccccctttttcagttttcgagaccaagaatccactcaggaagcctttgcaaagtcatggataaacttggccagcttctcggcgccttccagagggatggagttgtagttggaggcacggatgccgccgacgctgcggtggcccttgagaccagtcaagcccaagacggtggcagccttgaggaagctcttttcggtctcgtctgtgtctccgttctggggttcagagttagcatcaagcttcttggtcaactcatgggaagctaaaactcacctttgtcaccctaaagcaaatgttcatctttgacctgacggtcttgtcaggaacaatgcggtacacatctgggtgggcctccagagcgccgtagatgagagaagccttcttctcagcaacagcctgttggccgtcgaccttgtcggggtaggtgttgaggagcttcttgagcacctgaccggcaatgtagacgctgtcttccgtcagtacgctctcagggatggctgggtaacaggcatactcactcaaagatgctcagagtgttgtacaagctgttgtttttggcaacaatctcgtactgcaagatgatggggggaattggcaagccgagcttcctgagaaggggagcgctgggctggaccgcgtgaggggggaggaagctcttcttgaggatggcaacagtgacaccagtagagccgaggtttttttgggcaccaaagaagatgagagagtagttgttgactgggatgcggcgggacagaatgttggaggacatgtcagccactacgataggaccgtttccgttggcatcaggggtgaggaccaaagggaaggccgggaactcgacgccgtcgactgtctcgttgtcgcagaagtagacataggcggcgtccttgctgagcttccatgtcgactcatcgggaatcttgccaaacttgccatcgttgatggtgcgggcgtcagcaacgaggttgacatactcggggcccaagagtctttgagcttcttggtaagccttgagggaccagccaccggtgacgatgtaatcgaccttgagctctgtctcgaccttcttgcggagagcagccaggatagcctcttcatcatcaccgagctccttctcgagagcggcgtgttgtctgctcacccaggcgccaacaaggttgtagactgaggcggcgaactctccggtaccaccggcttgcatgaagatgacctcatagttctcgggagagaactcgaggtagttagccaggtcggccttggcctcgttgatgattttggtggccagctcagagcgatgactgtgctcggcgatgccgagaccagtgccattgtagtcgaggagggccttggaggcagcttccaggacgtcggtgggaagggcggcagggccggcgccaaagtatgtgatgtcggcgcgagaaggcattttgatgtgtgtcttgtagcacaagagatttattacaatgactctttccaagagttctctcgtcttcagtggatggcggggcatctttcttttatgaatgtggaccccgcatcgcccacctcgctcacccactcccctgtcctgtctggaccctaagccagccagtaacgcaacatgacagtaggcgatccgaaaccggggcttttctgtcaatggaaagctgccagaaatgacgcgactcgtgccttttccccagacttttacgcaagtgttttacagggggttaatgtcagtcgcagtggcttcccgtggggcgtggggttgttcacagggcaccaggggaatcattgcctgccggaagagaaccttttcagagggggttgagtggatgtgggggtcttgcagcgccgagaccgtttgatggcggggttgctctctgttcatgtttctccagacatatatccgcatgaataggatgaaagatgagctcaaaccttggtgagttggctgttatatgtgaggtagaggtgtaaagagtggaagacactcggcggtaaacagccggagtttgatctgacatccgagggtttgctcaccttggtcgagggcataaacaaagcatatgcggtagaggtgtgtcgttgaccgaaagagtgtcattggaggaagatcaattgtcaaagaattggtaagggacatacttaatccgcaacatacaacctacactcctccaaaggcattggatctccaagtcaccgttgatatgtcacccctgtcgatgacacccgcttgagcctcatcgttctctcgggcccagacatctgccgtgatccaccagccgaagcttaggcaccgttgactggcagggatgcttgctatcaccaccaccaccaccaccaccaccaccaccaacctgctgggtggtgcttggtcaggggcataaataagtgttcgggtccctctcccgacctcggatgagaaatattcccccaagtcgttggcctttaacttgtctcgtccagttacctatcacaccgtcaccagtctacaatacccatgagagtggagcgctagacttatccgccaacactccctcccgccttgttcctgtcgcttattccactccagccgctgatcgcctaccatggccgacactcgaaagccagccgaagcaggcccggcaagacactctcacggcgcaccatcagcttcgttccgtgcgtgtgcccaccttgttttggatttagctctacccctctgtcgcttgtcttcctgccccgttgtcctgttcccgaacacgagcttcgtcctgacccccactcatcgctcatctcacggtttgaatttcatcgtctaatggatcacacagcaacccacaactcgccacggacgtggtttctcacatcctcgctatcaccgctatgtatacggttgatccggttattactagcacacggtgactacgtggtggcctgtctaccaccggcagaaatcgaaaacgacgacagaagcgccgagttccgtgagctcatcaacgaatgcaagagcaaccgcaaagaccgcgaaggatggaaagatcgaatcaggggtatccggtgcgacggccgggtaatggggcagagtggtgctgccatagcggaagccgtccaagtctttggccgaattgatatcttgctatgttgcaagtttgaaggtatctcacattccccatctcacctctcccatgccctcgctcacatttcccacagctgtcatcggcacggtagaagaactctccaccaccccccggacccgcaacctcgtccgcgaccagtttgaaactatcttcttctcccaagtcaactttatcaaagccgcccttccccagttccgcgctcagcacacaggtcacatcatcattctcactagcatcggcgggcatatcggtaccccgggcatgtcgatctacaccgccgccacctgggccctcgaaggctactgcgactccttggcctacgaaatcgcccccttcaacatcaaggtcactgttgtccaacccaacaaggagatccaatccctcaccaacaagatcgtcttcgcgcctcagctaccgtactatgactctgatgtgaacccagcaccgtcggtgagggagatctacgggaatatgctgaacgccaacccagagacggcgattgatcacctcgtgggagcggaggagaggccggatgatatacaatatcggtatcctaaactgccggcggcggcgtatgacaagctggtgatggagacggtgcatgccttgacggccattggggggcatgagaacccgccggcgaggcatattgttgggtttgacggggcgattgctgtgaaggagaagttgaagacggtgacggaggagttggaggattttgtggaggcgagcgtggcggtggatatttttgatagtgagctgaagaaggaagcgaggcaagggggggaaaatagggaggggggagggggtgggcaggggaggtatatgagcgaggatgtgcagatagggatgatgtgagtgataacagtgcttgtaaagggaatagtatgtatatagttaggtgtttgatatcaaggtagataaggaaaagcgaggttatggcagataactaagtactgtttagtgattttttgtattcttattttttattttattttattttattttattttattttattttattttattttattttattttattttattttattttattttattttattttattttattttattttattttattttattttattttattttattttattttattttattttattttattttattttattttattttattttattctattttattttattttattttattttattttattttattttattttattttatttttttaattatttttttttaaatatttttttaattatttttttaattaatttttttttaattatttttttaataatttttttaattattttttatttaaattttttttcttggttttttttagggtttttttttattccacggccgtctggagctcggtatataggatgatggaatagctatatacgtggtcatgaagatggtctggtggtctacagcgatccagccaacaaaacgttttttgttttatttttccatcaaacgtctcgacagctcaaaaattggaccccttttcgatgcccttgaggattcaggggcacccgttgggtacaagtcccccgtggctgaaaatagcgggccaattatagcgaccatagctccaccaaggtcacacctccccgccgtggcacgaacctagcggccgacacccccccattggcatgggctggcatcgcattgcatgtcattaaaacaagtccaccccgggcaggcatcgacaaggcccaaaatcaggagctctcttttccttacgtcaactttgaggtcggtcagctgtgttcacggcaacggacatacctatctatcacgacgaacgcactgtgctcgacgcgaccgacccctacagctccgaaacacacctctcgacaaacaggagctcctcgacatgtccctgcccccttcgccatcatgactctcgatcccttcatacccatcgccccggctaggataaaagtgctggtgctgcccatcggccacatcaaacgggagcgcttcaccgccttcgtcaaccgcctcaatgaagagcacattgtccacctccgggacgtcacgcccgacagccggcctcacagaagtacgcgcactctccatactctctccgcgccatggcacaaccaactaacgtgatgttttccctattcagacatgttctcccccctggccttcccgggaggcgcaatgttctacgagctcatgacccaccagccctccccttcccacctcgccctctcccccttcgacctctggcgcgaacagctagccgtgatcgccattgccgacggcacagagctaggcgcctcagtcttcaacaaacgccactccggcgccggcggccgaacggtagaagaaaccaacatccgaaccctctaccaagacctcgaaaacctccgagaccaatacccaaagatgctcgcccaccaggtcctcatctttgactacctccccgccggggagaacccgatccccatcccagaagggataatcaccatccccccacccgacaagctcaagcgcacaaccataaagacggtcatgtgcgacgtgtcctccatcatcctcgccgagatgaccaccctggccaagtcttttgaggggctatcccacatcgactcacccggtgttcactcttcggccgcccaagacaggatgaatggtttggtgggacaggatgggatggccaggaggaactcgcagtttgccctccccggcggcagccggtccgtctcggcgaccgctctggcagatcgcggccaccacgcgcgcatgtcgatgcctcctgtttcgtcctccaaaacggcgtcttttggcggcggcggcgggtcgagtagttctacgccgtcggtgaggcctactactcctataagcgggaacaaaccacttcccaatccgccgctctacacgtttgacaatatcattggtcccgcctcttcggaccaaccaccagcacgatccgacccaaccgatagctttggcagtcatgacaaagtttctgtccaaggttttggctcggggggtatggacgcgaggataaggtccaagtctcggtgtcgtatccaggttgtcattgggagtttgtacctccaatccggcctctggtccaacgcgctgaaggagctgaccgaagcggccacggtggccaagtcgatcaacgatcatgtctggcacgggaaagcgctggagttgtgtctagtctgtctgttgttgcttggatgggcggggatagagtttgcgatccctagcgtgctgctcccgccgggtgacaaagggagcgggatagcgcagcagatcaacgaggcggaggcaaaagacccgaggcaggagaagtggctgaggcatctgcagtgttacatacccgaggtggtggagaggatactggggttgtactcgaggctgacggccgagtgtttgccgcctgtgccgtggagcgaggcggtggtgaggtttgcgaggatgttgactgcgctgcacgtggctggggggaggttggggagggagagcttggggatgatggttttgggggtggaggagggggagggagaggggaagggaaaggggaagaggttgctgaccacgagtccgaggtttacggtgaacccgacgaggacggtgattgtgcagatggttttcagggcttttcctgccagtgcggcgagcgagttgctgatgactgtggatcgggtgacaattctgagcgggattgcgagggtgcttgggatgttggggtttcagaggaagaaggcgatggtggtgagggagttggtcagtgtgctgattggggggctggtggaggctaggacgaggggggcggcggacgtggggatccatccggcggctgggctggttgggttgaatgggatgaatgggggggcggggggtggtggtgggagtggtgcgggtgctttggatttggcagagggggatgttgagagggggattgacgagtttttgggggtgttgctgaggacgtatggggttgtgggggatgtgggacaggctgggaaggcgagggagaacatgcaggttgccgtgacggatgatgatgagaagactacgacgacgagggacacgaaggataccgacttggaggttgtggcgaggattcagaggcagtcggccgcgaggtttttcggcatgcagactgtcaagttgaatatcctgaggtcgtgcatcaacttcagcgaggccttgcctgactttgcgggagtgttgaaatactcgagcgatcttttgaggacggcgggaagtgggattgcgcctggtccgaggagggaggatgcttatcctgcgatatcgagggaggaacaggttcgtctgatggccaatattctcaagacgtcgaacttgtccaagaggatgggcattggcgagctggcggctgagtactgggacgagtttctgctcagaggcataaggctggaacctttgcctgtcacgagaacgccggttgcgcacgccaaaacggtcttgcctggagcggcgactgctcgggcttcgcaggatgtggacccatttatttacaatccctttttgaagcgaccggacactgccatggttgagtcgacgttggttgctggtgagccagccacctttcggctgacactccagaacccttttgaaatggaggtggacattgaaagtgttcgtctcgacacggaaggggccgattttgaatcaggtgtcgagcacactattattggaccctatcggacgcaaatcttgagaatatccggcacaccaaaagctggcgggaccgtcaaggttacgggcgcggtgatcaaagtgagaggctgccgggagaggcggtttcccatttttgttgagccttgggcccctgacaatgaaaccagaacaaaagcttctgggatcactgcccttgaggcgaacatggttgccgtgtcaccggctgtcgagcgtttgaagccctacaactttgacctcaaagtcatctctccacagcctactgtggtagtcaagtcgtctaccctccctcagtcctcggtgatgatcttggaaggggaaaggcagcggttttcagtcaccttgcaaaacctgtcacctgacactcctgttgattttcttttgttttctttcaaagattcgacacaggaaccccttcaaaccgcactcaacagccgcgatgccacggccacggagctctacgagtatgagctcatcctggccaagaaacaggcgctccgtctccgcaaccgtgcccgcaacgaccggtttatcgctcccggccaaacagccacatttgactttgaaatcttgggcaaacctggtctgacgcacggtctgatccaggtcgactacgcgcacttgggtgtgcccccggatgagatcgccgagcagttctacacccgccaagtctcgatggagctgactgtgacggtcaacgccagtgttgacatcagccgggtggacgtcataccgttgaatagctccatccccgagtcgctttggaccaaatccctggataaaacaacccaactcctcaccccggaaacgcactgcctcttgctcctggatctaaggaactcctggccgagccagatgacggtgtcgctatcatcaggcggcggggagaatgacaggccgatcggcatggaagaacatatactgccgggtaacaccacccgtcttgtcctgcccatcaggagggtttatcttgaagacccccacgctttcatcccggcgctcaacccctctcgccagaggcagtttgtggtttcgaccaagatttcccccgaagccgaaaaagcaagccgcgaagcgttttggtatcgggaaaaagtccttgattcgctccgggggacgtggaagacttttacaggcaagacgagagaaggggagattagctttagggggatgaggttcaacagcaagatggtcgatgtgatcagggttgatgaggttgacattgatatctccctctctgggtcgggggaaagggagggggggaaggaggggaaggcatacgtcgacgagtttctggagctcaaagtaagggttgtcaaccgggggaaaaggccggtgttggggttgttgaggctcatgcctgtgctttgccatcggccgtttaatgtctctttggattttacgaggaagatggcaaagtttgcgtggaatgggaacttgcagtttccgattggacgggtggcgggggatggcggggtgagggaggtgagcatgggggttacggttttgtgcaggggggcgtttgagattggggggagtgtggaggaggttgtgccgtatgtggaggaggaaaacggggaggggaagaaggaggtggaggattttgggttgatggttgccggcgggaggaggagggagaggagggtttggcatgctaggagggggtgtagagttgtagtgagggatcggcctgaggagtaaagggggtgtaaacagaggttgggtggtgtgtatatatatatatatatatataagagggggtatcgacaagtaccacgtttgtggtcatgaggaatgaaaaagtgagagattagcttgtatgatttcactattgttgttgcccccgcctccgaaagagagcatcatgctatttccacagcagtccagattctatcctacttttgttcatcccaccctattatcccaaccacaaaaaaaaacgccatgctaattcaattttcccaaaaacaccaaatattattaaccaacaacccaatgtccttacataaccccacaactccccctcaccacctcgggcaccacatcctccagcttcggcaccgccatcgcagtatgataccactccaaatgctccctaaactcctccacgctcccaaaccccttgtcgtccatcacatacttcatctcccccgagtcctccccctcgtccaaataagtgtcctcttcacagtagggacatacaatccccgcctgccactcccccggctcggggggcatgtggttcgctatcgccaacgggcaaacaccagtgtctttggctcgttggctgtgcatgacagcccggaggcttgccagtgggggtagccattgttgaccgttttggagtcgtatgctggtgataatgggtctggtgggggttgttgggggagggtagatctgacagagggcatggtgcggaggtagggccagacgaggtagccgttgcaaaagtcgcagatgaaggctgcgtcgttgaagggggactcggaggggttgccgctgttgaggcgttggaaccggccgatttggttgcattttgggacgagggattcgagggagggggggcggcggagggggtggtgtttggtggtgatttggggcatggtactgtccggggaggtgggggattggatgttgtgatctgggcgttggtgatgatgggattgttgctgctgctgctgccagggcggcagggcttctctctgcttttggaggcgtaacctttctgcttcgtttcgtttctggagacggtatacttgtgttgcgccgaggcagcggggggtgggctgttctgctatcagggagattcgtcgggcggcgcggcattgggcgcggtggaggtcttttcggagggaggaggtgtcgcgcgcccagatggggtttatcgggccgccttgacgggcccaggatttgaggttttcgtagtgttcttggaactgggcgaggaggaggcggagttcgttgagggattcggctgtgaaaggagggcatggctagttaggatatctcaggggaagagatgtggggaagaagagacacaagaacatacgtatcctgtcgttctcgtagtagaactggccgcgcaccagctgtcccatttcctgaaagtccttctttgcctcgtcgagtgcgtcctccaacgcgcgcgtttgttcgaactcgtcgggtccccagtgacgcttgtcggcaaacatgaatagtcgcagcgcatctgtcagacatgtcccaatggcggccagaagagagccgactgtgtctgaacttgcccctcctgcgcgctccccgtgaaagccactgacaacgctgctcttgcggctgctgccgccggcagcgttactcatctcttgctcgcccgccaatgtctagccagttcgacttttcaatctttgcgccggtcaactattggaggtgtcgaaggaggttcggttcgtcgtcacaagccgggactttgtgctggttgcaccaggtacctgtcagtagtttgccgaacgggacttgggcccgtgatatattgtttaagcaagactggttcgtccgaaacaaacaaacacctttccttcttctactatcttccaccgagtcttgtcggggtcttgtcgaggtcttgtccaacgcgccgggtgccgggtgccgggaatgatgtcgatttatggggtcccttgtagagggtcctctctagggggggggggggttgcttaaggttggcttggcagtgggcaccggcagggaagcagcagtctagttcggcggcctcggacgctaagataagcgataagatttcgtgatgctgatggcgggggtcgtgttttctcgtgtcgtgagttaaagtgtttctactttggttaggaacaagagatgatggtctttattagggagttggagttgaagaagcgagttgaacagctgactgtagctccatgcagacagtaaacgccatcacagacccaactgcacctatcgttggaccgcatgctatgtagagacaggtgcatagtaagtagtacatagcttactgcggcatgggtttaaaaggggaatgccatgcgtatttttgccattagcattgtccaattaattctcaacccacctttgagcccctctcgctgtgccgcacctgaggccgatcagcagcctcagccctacgagacgaggctcgagatgtttatctccgtgacagcactgcggatcaagaacatcttacggagtatttgtacattagttcctggcacccaaaatagctccggccctgtcgggccctgtcgcgacatctcagctatgtattcgagtttgtcatgtcgtagcgaaagcggaggtaagaagacggtcggagacatgtgtgggttagggttgtggccgcgtaagacccgggcccagaccggagtattcagaattccttgtgacaaacaaaagaggaaaaaaaaaaaaaggaaaaaggtcccattgatgggttgaaacttttcggtatctcatacatctttgccacctgccaaattatcttgatctttttttttctttttctaaatcagttttccttgccggtccctgcagtatgacttcataatttcagtttatttcttctcttcgtgcatctgctgggcgatatacagagtcggtcccacgattttctcggctcggtttcactcgcttatcattcaattcttcggcggtttatgagcggttaaacccggccattcggtatcagtcgctcattggagggaatagcttcaaaagacacacaaatctgaggcaggaaaagaggaagaggaggatagggtaagcggaaataaatgaagatgcagccaggacagcagcagccttcacgaaagcggatccttttcctggacgcctacgactcgttctccaacaacatcacgtcgttgctgcagaccctcttggatgtcgaggtttcggtcttgcatatcgactcgccatcgctttttccttggggcattgattcaacaccggatgaggaggccaagtcgagatttgtcaaggagctcgccagatatgatgccgttgtttgtggaccaggtccgggcaatccgggcaaccaacgggatgttggcgttatgaggtttatttgggaactggaggaggggaatgtcctgccagtgcttggaatctgcttgggctttcagagccttgtcaattcttgccagggaggtcaggtcaagagactgagaagggggttgcatggtatggtcagaacaatcatccaccgtatggactcagttgcgccggtggagggtgacatttttgccggggtgaacgggttcaaggcaacgctgtatcacagcttgtgtggccatattggacaggagggcatcgaccaacaagaatgggaggaagctcggtggcagcctcaggacggctgccctgagttgttgccgctggcctgggtggaggaacagcgtgaagagggcgagggtttcgaagctggaacggaaagaatcctcatggctgtcaagcacaggaccaagccgttctggggtgtgcaatatcatcccgagtcggtgtgcacagaagaggagggcaacaagatcattgtcaactggttcgaggaagcactcgggtggaatcaaaaacacaagaggacgaccctggtggatggacacaacctggcagaggctgccatcaagccgagcctgctctctcagctcacaccgtcaggagaacctagggcttcgggacagtggtgggagaagtttgagtctgacccagttttgcgctctgtctcggtgcccttgcctcgcggcattcaggtcccggatatcgtagaggcagttgatcccgatgcctctgagcggatcatcctggactcggccaacgcggcacctgccaaatcgagtgctgatgttcgcggcagatacagcattattgcggctggtctggacgaagccctgcgtcttgaataccacgccggcgatgactatgccaccaccaagctcaaggctgttgggggaatgtcagttaacttgtcacagcaggttccgattgccagatatggcagcatctgggctctgattgcagccttccaagacgcaagacatatcgacgtcgaagggcccgagacgaccccttttctgggaggttttatgggatacgttacctacgagcaggggctcatggacattggcatcaatctcgaccaccctcgcccccaccatcgaccagacgtctgcctgagctggatcaccaagagcatcgtcattgaccacctcgccggcgtcgtccacgtgcaacacctccgctctagcggctcagaggaagacacctggctagagaaaacaaccggcaaactcctcaccctccaaaacatccaacgccggccgtccttcaactccaaaaaagacaacacccaactcccccaatcccccaccaaacgccgcccatcccgcagcaccacctccatccaaacccccttgacaaaagagtacgaggacaaggtccggctctgccaagaacacatcgccgcgggggagtcgtatgaactctgcctgacagaccaaacaaccatcacccgtcccctcagcgatgtccaaccacccctatcacctacacaacccaaacacccccgcctctcctcctcccccgccacccggcccaactcctggtccttgttcaaacacctccgcatccgccaacccgcccccttcgcgtcctacctccgcctccacccggcaaccctcgtctccgcctcccccgagcgtttcctaacctacgaccgtcaagggaaatgttccatgcgtccgatgaaaggcacagtccgcaagtcggacatttgctccaccctctcccaagcagagaacatcctccacgtccccaaagaggaggcggaaaacctcatgattgttgatttagttcgtcacgacttgcactccatctgcggagcggggaatgtgactgtgcgggatctgctaaaggtggaggagtatcaatctgtgtttcagatgatcactgttgttgaggggcagttgcctagacagggggggtatggtgggttggatgcgctggcgggggcgctgccgccggggagtatgacgggggcgccgaagaggaggagttgtgagatactcaggggggtggaaggggggagggagagggggttgtattcgggggttgtgggctatcattgtgttagcggacggggggattggagcgttacgatcaggagtttgtttaggtgggatgatgaggtggggagggaggggggggaggaggaggtttggaggattggggccgggggtgcggttacgatactgagcacggaggtgggggagagggaggagatgtttaccaagttggcggggccgttgagggtttttggggaggtttgttaagggtgtggtaggttgaaggatgggatagatgtgcaaatgcagagcacactcaacgtgtgtctggtggtttggcagatttcggaataaacagggcatctggttttcaacatgggcatgtcggcgcgggcgttttcttttttttttgtagtattatccaatgatgtatatggtagactcaacaatgcaaaacttcgaaggtaaggaagcaatgctttaacgcactgtttcggtgtggtgtgcgggcagagaggatagatatggtcagagatacacaacctctaaacggcttttatcaaccactattgcttccttttcagaactcacgcctttgagagtcaagtggattgggcttgctgtcgacattttgtgccaactataatccgttaacctagcagtctgcactgtcacaacctgaccttgaaactgggctccccctcgagcagccacctgtgggagagcatgtcatatttcaccaccgtctgcaggtgagcctgcatgcgcggcttggttgaggaggtatattcaatgaattccagggtgacgggatttgttctcaacctcctgacacggggaaggtaatgttgctgcacgaaagctcgatcaacgagccgcatctctttgacatatatgaaacggatggggataccattgtggacatagtcaaggaattccttctcaattctatcaaagaatatcttttcctccacggtcaagtccatgaccagggatatgttgctcgagattttgaaacttatttgaacatgtttgtagtgtttgaagcggggaagctgggctgccgaagtatttcaagatgtgaacgcgaggctgggcaatgtacgagcgggcagaggtgattgggctgttggtaatcatcctggtaaggccccatccagccttggtagaatatggatggctctatccaggccatgggtttccaaacaaggcaaaaagactcgccagcattgcttccttgaaacatatcaaaacaacaagaatattgagagaaaataccttgatttatcccctcctaacctcagtcccaactttccaaagactatcaaccgaaaaaaacaaatcccacacaccattctgtcgttcccaccttcgctacctgccccatcctcccatgacatgattgcatacctttcgtcgaacaccggtaattgtacaaaaatcaaaataatggataaaacaagctccaacaccatcgcctttccctattcctcatcataaagctacccccatcatcgtcaatctcccgaaccctccatccgctcatgggtatccatctccccatcactcattcaagaatcatccccttccccctaaaactcctgctcctcctgaaaaaactgcccaaaacttataatcgtcccataaatcaacaacccacccacaatgctcatcaccgccgccgccgtggcgataatcccgctatgcgccagcaccaccgggagcgcgatgcccatcacgaccaagaacccggtgcagaaccggcccaggtcgaggatggcggcgcccgagctctcgacaaagtcgtcggggttggcgcagtgggagcatatccagttgggcaccggggcgaggacgtaggtggcgacgacgaggagggggtggtatttggagtagagggcgcaggagaggatgacgaggaggaagccgagggcgaggacgaaggagagggctatgattgtttttaggccggcggtgggcattgtgacggttggttggctgaggtgtgaggcgggggggctggggttgggggtgtgttgagcgagtgtatgtgtcgttgcgatgggatgattgattatgacctggctgatactaacaggccgtatctcgagtcggtatccctgggtgcggtcgtgtgcgatgacggtggcgtcagagttggaggctgtctacgtgtgttggagcttgcttgcgttcttgcctgtgacctgtgacgccgacgccgcggacggctgggtaggtcagccttggcgggctcccctgtgcggctggcaggcgctaaccctgaataagctagttcagtataaaccaaggcccgtgctttccccaaaaagcggataacgtacctctgcggcaggcgacgacgaagctaggagctgcctgggggagttgctgaggtagctgggtgggagctcgaccatcaaccacaaacaccgccttaccacactgcaacttgacgactagaccacaaccactttctctaccaccttgataccaaatcgaaccgtcagggttgatcatcgtgacttgaactgcacctcggatcagacaaacagcacagtcgaacaggccgccaccatgttcaggaacaactacgacaacgactcggtcacattgtaagtttgcttgcttgctattgctgctgcgactcggggcatcccacctttttggtcaacatcgctgactgacacactctctcaccaacccagctccccacaggggcggatattccaggtcgagtatgcagccgaagcagttaagcagggttcagtcgtagtaggaatcgccagcaaaacacacgccgtcctcgtagcgatcaaggtgcgtcccccccccaccttttaactaacacttatcacatctaacacttcatgccctccgcctcccccccccccccagcgcaacgcagaagaactctcctcgtaccaaaagaaactcttccccatcgacgagcacgtcggcatcgccatcgccggcctcacctcggacgcccgcgtcctctccaactttatgaagcagcaatgcctcggccaccgcctcacctactcccgcaacatgcccatccgctccctcgtcgacatgatcggctccaaagcccagatcaacacgcagcactacggaaagcgcccctacggcgttggtctcctcgtcgccggcgtggacgattccggccctcacctctttgaatttcaaccgtcgggcatgacggaggagatgattgcctttgccattggtgccaggtcccagatggcgaggacgtatctcgagagaaacctggacaagttcaagaccagcacacgggaggagctgattgagcatgggttgagggcgctgaaggagagtttggtgcaggatagggagttgacggtggagaataccagtgtgggtgtggtgggctatgtcaaggagacgaagaagacggagccgtttcaggtgtttgatgggcacgaggtgcagaggtatttggagctggtggcggatgataagaaggaggggggccctcaggcggcgacggtggaggatgagagcacggcgatggatgttgatgcgtagagagcaataatggccgagttattgtatgaaggaatcctggcgcactgagggaggtcagtccggagttctttgctcggttgtcggtgcagatgcaaatgcagttgttgcagttgattacgcagatggaaattgatgaccctttgtgggtcgggctttgtgattattatgcaggcccagcgctttggaagagatagagaaagcacttccgagcatgaaaagctacatcagagtctgagatgggccactgatttcgcctgagcgaaaggagtcttgatttatgatgtttttgttttctggccattccatctagtttctccgtccatctatcacattccctattgcgagctccagttcaacttgagcgccgcgtctgacaccttgtactcttccaacgccctgatcgcctcctctgctgtcttggcctcgacaaggatgttcttgttcccaccgtggataaacccctcttctacgctcttgttgatccactgcctgatgccatcgtagaaaccgttgatgttgagaatgacgatccccttgttgtgaatgcccagctggttccacgtcatggtctcaaacagctcctccaaggtaccgtacccgcctgccagggcgacgaaaccggagcctgggccaccgtcgaggacctcttgggccatgaggcgttttcgggtgtgcatgtcggggacgatggttgtccggccgaagactgtctcttccgggactgtcagggaggaggtggaggaggtatggggacgggaggaagggttggacgggtcggggatggtggaggagtagtttgcgtcgcgctcgtagcggacgagggcttcggggattatgccgtggactgagtccggtccggagagggagacgagggtacgggctacttcgcccattaggcctactgtgccgcctccgtagactggagatttgttgttaggactggagagagtcaaagggaggcggaggaggtacctagttggatgttgtttttggccatttctcttgcgagtgagcgggcggcttcaacgtagatggggttaaagcctggggaggcgccgcagtagacgcagatttttgtgcgcttgggggtggtttcgttgttgttgttgttgctgttgttgttgttgctgttgttgttgttgttggcgtcgcctgattccatgatgggcgagttgtggtgtttacgaggggatttgttggtggtaaggcgcaaagaagattagatgggacggcgggctggtatggaaggggtggtgtatacaagtccaactgtgagctgtcgtctgagtcactcgggataagcaagttgactggaagcaacctggaggatttattatgcgcttctgggaaagagtccgaggatcccctggttgatgacgctcggcgaacctctaaacaagggcggctgctggtgagagtagtggagttggttcttatttaaacgaattggaatcgcaagacaagatgtagaaggtggcagtcaaagggaggctcagtgagatttcgtcgaggtgtagataatagacccgagcaaagcaccgtccttggaaactaggaagaaatgaacagcgagactgggatgatacttatatatgtttgaacatgagagacacaactcggtcgacatggacctgaaaggcgacccgcgggattgaacgacctgttggccgtgaacgtggacctttgatgaagccagatgtgggccagatgtatgacataacggcggctcgtctttgacgaatcgaacggcgccgaacaccacacgagcttcacaaggccaaatcatgggattgggaatcccccaatatagagataaaatggccaaacgtggcagtcacgagacggcaccgttgtcctatcaaacttgatgctagttttgtcgttgtacagtgattcgtcgggtcccagactacctcaacttacttgtcttcacaagtctgcatcgatgaatggagggaggggttcaatggccggtggaggggcgggcggtgccgtggggcaagattcgggcggtgagagctccccttggtctgtgcataagctttccggacaggcagtcgatggccccactttattttggcgatacaaattgtggttgactcaattgcagcgaactctcactctctttctttttttcttctgcgtgaagcctcgtcctcttcaacgctgcgtttctatgcgacaaacggaaagtcttgttcacacactactttcgacctcttcggaggatcctttacgcatatgagaaattcggagaatctgcttcacaccagttcgtccgtcccacagccttcctcggagggttgtgtcgatgggtcgcgagctctgccggtgacggcttgacgcaactctgcgtctgtaattggcatcagaaaagcagggcccaggagaggctgctttggcggttttcttgctggtgtccctctgggagagtcattacgaagcttgtgagaaaatcacttgagtgcaatacgcggcgtgtggctgtctctcttcggacgggcagcctcatccttcgattccgattactctgttgaggacgaggcttcaccaccttttttctttcttcaggtaagcagttgtttctatcctcgatgttcggaatactactaacgaaactcgatgctgttggcatcatatgaccaggatttgggaccttcggcagacgctggaaatacccgacgagctcctgtataagggagcgtcaagcctcgcagctgaggctgatgaagatatccgtcacatcatggacttttgactgtcttggtatccgatagctttaccatagcccctaataaaagatgaacttaaaatgccctgtcttattcttaatatgtgcctaaagtgaagcaaacaaaacagcaccttgttgaaatatgtggggtgcatggacccccacccagcctcgggagctgccgtggaaccgtggcctcgtccctgactttgatttgcagcgccggccggccggccacttcagtgatccagggcctggaattacgccacgacgctagacagaaagcgcaacgtccgtctcggaaaacgtgccctttgcaaagacgacgttttttttttctttggatttttcttgtccttatttccaaacgtcttcccatatgaactaaagtcaactccggaatcaataaaatcgcccaagatgccggaacccgtcgcggcagcaggcgctgagcctgctcgccaggaggagcaaggcgtaggttgatatgctacccaacggctggctgtctttgaccatgttcactaacaatggctccagcaatcgatgctcatgaaaatattccaaggtcttgcgatgtggatggccatgcagtttgttatgaaacagttcacaggaggcggccaaaagaccacgtctgtcaccaacgccgacggacaggtagtccaagtcgcaactggtgccataccaccataccatgagcgcccacgacagctgaacgacggagctgtctacagccatattccccaatccatcgccccaatctggccagacaacagcgccgtcgatatcatcgttaccgtttccccgtcattcgttgctgagcctctcgacaagctacccaaggacaccattgtctttcaggagaaggggttcaggattggaaactggagcgactcaagagttgccgagggaactatcaatgtgccagttcctgttcagaaaaacggcactctctggggacacttttatattggattgcccggcgcccctctcgatccgactcggcgcaattacgatcctggtgctgcttatcactttgttcaccctctgacgcagtacatccccaagaagaaggagtccaagacgaggaacttgctatccgacaatgccgaggtggaggaagtcgtggtggaggatgagcccgagcaggctggcccgattgtcgccaactactaccaccccaacgtgtcgctgtccttcatccctggtagcggcacgttttcgtttcctcaggctcatccagctattcgccagtatatccgtctcgaggcaacaggtgcccgtgacggaactggccagaatggatggtactaccccatcctcttcgtcaacaccttctggcagctcaagtccaagatgaccatcgtgaacgagaccgtgaccactttgcccatccgcattgacctcaacaacctggccgactggaagttcaagctcatggcccccattgagacgaacagcaaggaacaagctcgccaggcggcctggggaggcggcatgtcagccggtggtggcgacggcagcgagatcgagatggtcaaggagatcttcatggacaccaaccccatcctcctctgcgtcaccatcatcgtcagcatcgcgcacatgatcctcgagactttggctttcggctctgatatcgcccattaccgcaagaagaaggacaatgttggtatttccgtcagatccatcctcgccaacgtcttcatgcaaaccgtcattttcctctacctgatcgaccaatcccaaaacacctcctggatgatcctcggcggccaaggcgttggcatcctgatcgaactctggaaaatcaccaccgtcgtcaacgtccgcgtccgcgcctcccccaactccctcatcccttaccgcatctcctttgaagacaagcacaagctcagcaccacggagcaaaagactaaagagtacgacgagatcgccttcaagtacatgtacatggccggcgtgcctctcctcctcgcctacgcggtttattccctggtgtatgaaacccacaagtcgtggtacagctacatcatcgctacgcttgtcggttcggtctacgcctatgggttcttgatgatgctgccgagcttgtatatcaactacagactgaaaagcgtggcgcacatgccgggcaaggcgatgatgtacaagtttctgaacacgtttattgatgacttgtttgcgtttacgatcaagatgccgtttctgcatcggttggcgaccttgagggatgatgtgattttctttatttatatttatcagaggtgggtgtacaaggttgattataccagggtcaacgagtttggtcaggggggtgatgaggatgaggaagaggaggaggaggaaggggccaagaagattgaggagaagaagaaggaaggggaggttgtggaggagccgaaggaggagaaggaggaggcggttaaagtgacgggggctgagaagaaggggaaggcgaccaagaggaaatgaggtgttgccatgggagtgggaggttgctggtgtgtaattacgtagattttagcattacatgaattcatgtcaaaacatgggcaaaatagggagaaccgaggtgatctcatgaccattgtaaacccttgatattcacatgttagcccccaagctctgcttgcctagccagttgctcgcatgcctttgctcatctttatacatattcaaacatgtcgctttcccaataactccaaatgctcacgtccatccgcctcattagttccaatacatctcccccttcccgcagtgcttacccgctagaaaaacctccaccagacaaaaatcaatataaacaaccccaacccggcaaaaggcccatactgcttcagcatcaaatcccaattgatcctcacggccgccttgcgatactttgcgctatcatccctcaacctactgctcaactcgcccatcctctccaggctgtccccccgatacagcaaatcctcaatattcttggtcatgacctttgtcacgtccctcagctcatcattgagcttgtccaggttctgcgtcgccctcgcgtcagaataggtagcttttgtccggctgatgaaggtgtcaaactccataaaggcgtaggggcggaggatggtggacatgagctgctgctgggggtaggtggtggagaactcggtggcgaggtcggagaggtaggtgaaggcgagcttgcgggggtaggaggcgtcggtgatggtgaggtagacgatgtcggactggaggaggtagtggattgtgtaggcgcctgacgagatgctggcttgggggttggaagtgcgggttaggcggcggaggatgagcttgatttgggattttacttcggctaggtcgggggggtcggagggggacgtgtctgttgaggcgcagagcattactcctattgggggggggggggggggggttagttgatgaaggggcggtgggggggaacgtgtaggggaaaagggggaacggaccgtctatgcgggcgatttgggttgagcggatcattttgatttgaggaggaggaggaggggggggaggaggaggaggaggaggtggtggtggtggtggtggtgcgggtggtgaagttgtttggcttggtattgcggctgttgctgatgctggtcgcaaaggtgtcaaagaccagccaggttacctttgggcaggcgcaagtgtacgtggcttttttggttggagaggtgtcgtccttcagcttcggctccggggcttattgcagcgggtcggtgaagagcaatacagtagggaggcacgggcgggtatctgaattgactgaaagaaaagatggagcaagtgtcatcccaagccctgttgctgacgtgctacggtacgttgtcaatgatgcaaatgtcttacagagacaggggcagctagctgtaggggagaaagctgccgcatgtgtgtaaggctgaccaatcataaaaaagaagttgctgtggtaatcggcaatctgctccactttgaatactgcacctgcctgatgccacagccttgtaatacatccacgttcaccttccctttactctgtcagtgggaacgacgtgtttctctgcctttcaactttgcccgttggcattccctcttctcacacaaacatcagacaacattgccagcccaggtcatattacagcagcacatacagtaccgagtatccatcagtctcttactcgcttgttatgtaacaaacatcgcatcgttgaccacccaccatcctccaatcttttttttaaattacttttgttcccagtcacgaccggatccggcgatcaaaagcccccagagaaacctaaaccatcattccagtacttatttggagctatcagcaacgatgggtgactctaactctggtgcgataagggccctgtcgaagagtcctgatgtccaaagccccggggccccgcccaagggtcctgaaaacacgccctatcgagacttcgatcgcgaaatcccgcattctcaagaggatgatgacgacggcggttacgctgactactctcgagccacaagaggctccaataagcgtagaagctgtgacgagcctctggtttcaaggtctaagaaggccaagactgctgctcagtccaaggcggggcttaagagagcccgtaaattccaacacccgcaagtttggggaaagaattcaggtctcttgcagctgcgcaacggcaatgcccttcgcgtacgtataccttgacaccacgaattccgcgctgaggctgaccctattttgccaaaggatttgttgttggctcctggatcatggaaccgtttgggcgaggccgatcgccagaccatcttggccaaattgcccaacggataccagcttgacgggaaacccgatgttgcatctctgacaaacgacaacaactttcgcgacgactgctcgcaatactacaacagcatccgggacggccatctaactgagaattggcttaccaaggcatggaaagcccactacaaagatgtgcgcggcgatttcaagaagcatcttttcaatgcgttcatggacaacttcatggaggatgcttctgagaagcccaagagggccgacaagggaacgggcaacgaattgggaactgaatccagcaagaagacggaaacggagaccagcaagaagacggacaccgaggccagcaagaagacggacgcagagtttagcaacgaggccgacaccgagaccagcaagaagacggacaccgagaccagcaagaagccggacgcagagtcgaacaagaaagcagacacagagtctagcaaggaggccgacacaaattccagcatgaagacggacacagattccggcaagaagacggacaccgaggccagcaagcagccggacgcagagtcgaacaaaaaagcagacacagagtctagcaaggagaccgaggctgaggccagcaagaaggctgatgacgaactggcgccggctggtgacaacaaaacacaagatgccactggcaaagctccttcgcccaaggccactgactagaataaggggccgaagcgaaacccgcctcgcgccgtgaagcgcacacgagacgagatggatgcggggtcagttgagaagaggccgcaggaaccgaaggccaaggggaaagcggtggacgagaatcccacgtcagacaagaggatcacacggtcccagactcattcagggcgtggaaaaaggaaaggtggttccgggggctggtctttatatcgcatttcagagacgagatttgatgggaagactgaggaatttcaaggcgaccctgaagattctgaagctgctcgtgatgcagcaggagagtcttccaagtcggggcctgctgatgttcagaaatctcgtgacgagggaaagggtaaagagcgtgatgacaatggcggagatgatggttgtggagggggtcatggcgggaacagcgacggtgacaagaatgatgatggcaagaagggggatggagatgggccgggtgacaagaagaagggcaatgaagaagaggaggatgtggaaaaagaggatgaggaagagaaggatgaggaagagaaggatgaggaaaagaatgatgacaacgatcaggccagcggacagaccggtcttgaagatacaccagatgaagaagcccccaggcctggctcttccggctttcagcctgcatctaggagtcgaaaaagatcccgaccattatcttcatcctcggccggtggacaatcacccagactcggcttttcgcctcgatctagaactcgagaagcatccccatcatttttgacacctttggcccgtggacaaacccctcgtcccaggcctcaaggaggatcccaaccatcatcttcttctttggccggaggagaaacgcccaggcctcgccaaacgcgggacgatcgaagagcccgcagacccaaccaaagagattaccaaatgctcgccacgtaccgtggacgcggatcttcagcggatttgggtgaccctcgattggtacaatcccgatgggatccgacggaggcaagttggctgaacttgagtaacggggccacgatgcaatggtcggtaacacaccagcccgcaacatatcagcctggcccagtagagcagtctgtagagcagtctgtagagcagtctgcagagcagtctgtagagcagtctgacccagaagagcacgacagtctgaattctctgttccctcgcaacctactgttgatacctgacagaaggtcgccacgtgacgtaatgagacgggtatcggagtgggttattacgcaggattatgcgccttcaccccttttgcagaccatagcatcattttccgaaacgtcctcgtcgacttcaccaagcctcaacctggcagcttcgccgacattcaacacacctgcgagggggggatactcggtctacgatggtataaccggtaacgaacttccaccggaccctccccggccccgtcgcgtgacgccttctccgctgtcgcccgctcccgcggtgccccctcgccctgacgttgagggttcttcgcgccctggaagtcctccgcctgagggtgacttggactcttctgacactaaccgatatctccccgacagcccgcttcccgacgaacgagacatgtacccattgttattttttcctcccggtggcccaatttgcgcgatcaattccccggggggaagaatctttcaggtagcctcgccgggaccatcactggttgttgtccaccgcgaatcgcagtccattttcgccgttccaccttccaatgcccgcttttcgcccaggggtgaacttcgaccgtttggaaggtcttatgggtgtggcactttgttgccgggtcttgtgagtccgcttactcgtgtttcgccccgggctgagctgctgccggccccgccgggtgtttcggagactgtgtatgagaatctgaatgggatggctggacgagatgaggaagagggtgaacttggtagtgctgaaatggatttggacggggatgagagttcaggtgaggaggctatgtccaggctgagtatcatgggtccaagggatgagattggtagtgttgaaggggatttggatgagggtgagagcacaggtggtgagggttcgtctgtgcagtaatggtgttgagcgctggagagggggaaggatgttctcagcagagcgagttgggaattgtgtttttttttttttggtgttggggagttgttttgccaagagataccccttattgggcagcgataggaagttttttggggcgagaagtagaacaataacgagaatttgatgatgcgactgcctttttatttttttggtgcagataatatgtctcatgctacatatatactccgattcgaagaaactaaaccattgttgaaaggggctgggttgtcacccttgccacaaaataattaacatgggaaggaggttaacccatattatattgtgaaccatggcttgtcgatagggcttttgagatatttggaagggttctactactattgaggtgtggtttatagtatggtacaggtcagctttgtttttgctgtgccaagtattttacggggagggtggtgtggttgtcttgtaaggcgtggtgacaagaatgctcttgggcgtattgagatggctgaaagggggtatagaaaccaccaaactaaatctcatcctcctcctcatcaaaatcgtcctccctccccatgtcatacaatatcctgcccccctcccccccacccacctcggtctgggcgtcaaagtaggggagaacaacgccttcgcggtcgcggcgttgtttttcggtgaggccgaggttgaaggtagcttggattccttccccctcctcttccgttgttgctgtggaaaaagcggggtggtcagacaggaggatcactccgccgacaccctttgtttgttgtcggtgttgagcggttgttgttgggggtgacgggaagaggacgaacttctcttggacgacgcggcctgatttgcggcggagttccatcgttatcaccaccccttggggggaggatggggggcggagggagaggaggacgccttcgcgggatgagtggaggccgaagaccnnnnnnnnnnnnnnnnnnnnnnnnnnnnnnnnnnnnnnnnnnnnnnnnnnnnnnnnnnnnnnnnnnnnngctgagaagccaacggtggggctactatgaaagtcaaaggagattcattccctatatattcagctatttcaaatcagggcaactcgttatagtatccatattccatatctggctacagttcctacaacctccaaaatgccccccgatatcaagctcaaccccgccaaattgacaagatctcgagacgctcggaccatctgccagtgacgctaaaaatacaggggggtctggcctactgaacaatcaacgtggtgcccgctcccacatcgtttcccagcagcgcggtctggaaatttccaaactgcctgccgacgtcactcccgttgaaatcgcatcgcagatcaacaaacccactaaacgaagatggcggacagaaaccacggcagctcccgtcgcggaggcgatagatcacactatgataacagagacaaagacagagacagagatcgccgtcgcgaccaagacaggcgcagagaccgcgacgacgataagagcagacatcaccaccacgatcggtcatcgcgcgatcattacgggagggatagggatagagacagagacagagacagagacagagatagagacagagatagcagaagataccgctctggatcaagagacagaaatgaccgcaggcgatcacgttctccccgaggcgacaacaggcgagatgacaggggcaaagggtatcgtcaacgggatgagccgagaggagacagggagaaggatcgaggaaataacaccccaggtaatgctgagactttaggcagcggtaagtcaccttctgcttcccattctcgctgccacattgctaacaaactcccagagaaaccacccaccaaagaacttcaacctccccagcgccgccccccaccagtcggctccccccgtcgctcagaaagccccgacagaggcttcgaccgcgaatttggtggcaacaaacccacggaaacactccccacccgctccaaaccaaccagcaccaacgcgtcgacccctgtcgcagcacctgtttctttcaaggttaagccacgggacgatcatgacgggacatactctcgaggccgtagcgaggaacacgacgagtaccaccagtcaagagggcggttcgatgccgaccctatggatgaggacgaggaagacgacgttgtcgtcgaggacgacgggctggacgacatggctgctatgatgggctttggcgggtttggcacgacgaagggaaagaaggttactggaaacaatgtgggagcggtcaagaaggagaagaagacggagtatcgccagtacatgaaccgggttggtggtttcaacagacctctgagtccccctcgttagaggcgactgtagggcgactgggagggcacaagtgggaagtaccaatttacaatctgtgtcgttggaattgatcccgtttgtgaagagagagcagcgctgacaagacattttgacgagggtccccgacacggtgtaatgccagcttcgcgcgagccattatcccatatgtacacgtatggttggattttctgtagaaaattatcattatcgctgttatcctgctgctgttgttgttgttgttgttgttgttgttgttgttgttgctgttgtttgttatgatcttgaccgcttcttacctcacccctgcatgatgcctaagggttagggttatgatacgctagtcccaatttttttttttcatgcattcaaaaaccccaaataagcggagcaccttgatggcgttgcttgcaccacctcctctcaccagccacccacttgaccttcttacctcaccccccccccctcacccttttctcaccttttctctttaccatcaatccactctcaccccgatttcgcaaacctctccctcatttcgaaatgggctcctcctccaaaaaagaccgcgcggaatccgtcctcagcgcccccgccccctccatcaagagcgagaagcgggagaagagatcgtccaagaagtcgtcttcctccagactggaggatgtagccgagtcggtttatgaagacgaacaacacaagaagcgtaaaaaggagaagaaggagaagaagcgcaaggctgctgctgcggaggcggagggcgaggatgtaactgctaccgaagaggtgactgacaaccttctcaccacggaggacgagaggcccaagaagaagaagaagaacaagagggatgatgatgatgaggtgaagagggtcaagaagaggaaggaggaggaggaggaggaggaggaggaggaggggtcggatgggggggagacgatcaagagcaaggagtcgaggcggaagaggagggagagggaggaagaggaggagaaggagagacggatgagggtgaggacagagaggaagagggcctagggtggggagacagaagaggagggggaggagaaacctaagacggacaacaaagagaacaggaaaagggaggagaaaccccccgnnnnnnnnnnnnnnnnnnnnnnnnnnnnnnnnnnnnnnnnnnnnnnnnnnnnnnnnnnnnnnnnnnnnnnnnnnnnnnnnnnnnnnnnnnnnnnnnnnnnnnnnnnnnnnnnnnnnnnnnnnnnnnnnnnnnnnnnnnnnnnnnnnnnnnccgtcccccgtttggacttcaaaccagtttttggcaaaatttgaaacagccagttcagggctgccttccgcccgaaaattcgagactggggggcaaaaaactgggcctgggcgcgtgactagtgtggtttcttgggtttgtttgttcttggtttgttggctgccggtgcttgcctttttagcgttgaaagtgcgtgcgaaagtgggaagtggggctgtgacgactcaccagcagttgtaatactgggtgagggtgagggatttgggcttgtacttttgggacaacaagatgatgacggggagggtggtgttgtggggggtggttgggtgggccaactgggcgaggtttgggctggagatcaacaagaacaagaagaacgggtacaggaaccggaaggaacagaggcatttccagagggggtatgaagggcagagggggttttggggtgggagaaaggtggaagaggtggtggaggataaggagcatgattaccggaaggtgttgagggagagtagggtgtatgcgggcaggagggagtttgaggggaggagggaacacaaggttagggattatgagagccggagagattatgggagtcggagggagcacagagagaggagggagtatgatgaccgcagggagtgaaaagtccggggattagctgtagatacaatgctgcaaacttgggtccatttcggcgccgaacaccagcacggtatatgatatatgtatacagagaagaacaagaactccaaatggcaaatcaatggcttttttcttcttggccaatatgacaaaacaaaataaacgcacaaaaaaaaagacatggtacaacaagaagcgcaaacaaaatggtttggcaacctccagccagcgcccgctacccttccttgatgggtgtcccatcccatctccgcgacccggtgtttttggtgtgtatgccccctctggcagcatgactttcaaaagctcggcgggaatgtatatttcctctccaccgctcctctcaaatttcccggttcggtgcacaaattgacgtttcgtggtagtagttggtgggctatttaccggccaaagatacggctcagcgcctcaaagacgagaccgccaaagatgatgaagcctaggacgcctgttttttgttttttttgtttttatcgtcagcaattgctgggatatatggtgttgggggaggagagaggacgtacccaaccacacggggctgattggcgacttgagctgttccttggggaccttcttcttgatctgctcgatgttcttgcccatgcgcgcctcgttctccttggcgaacttttggttggctcgcctttgggtgggtgtttgggcctgtttagcaggtggtgttagttaccgcatggtaattgatgtggttcgtggtggtggtagagggcgtaccattgtgggagatgtggtgtgctatttgctgtggtggtggtggtgaagctcgagaacgaggacagctatccttctgtggtgtaggtttggtcgaagttgtggttcgtggcggaataaacccagcaaggaaactgaattgacttatcgacgggtgggtatcaagtcgttaggggggttcgtaaaaagggaaggaggtgggaatgggggatgtgaatacgaaagagacagaatggttaaagactggccagattgcacacaccccagcacatatctcgtacggagaccacccagttcaagggtcgcgaagttcaggccatctgtcgttgagcacagcagcaagcagccagcgcgctatccacacgccacgcgggaggagcatggaccgcccctgtgggacctcagcgggggctggcagggcaggggtggggccaatccagtggtgctgatctatcagcagcagcgataacttcatgtgaacccctccttctcacacctcnnnnnnnnnnnnnnnnnnnnnnnnnnnnnnnnnnnnnnnnnnnnnnnnnnnnnnnnnnnnnnnnnnnnnnnnnnnnnnnnnnnnnnnnnnnnnnnnnnnnnnnnnnnnngttggggagcgcctgttctaggagagactgacctttccattgaaggtgcgtgatcagcagggccccctgggagtcactatccacccagatgagatccgtgtcatcctgatcgttatacgcaaagtaatacccctcccccgagaccgcaatctcaaagttgtatttcccctcaaaaacatccgacacgttcggcgcgtgaaccgcaatgtaaacatcctccgtggccgtgaagttgaaattgacagccccctccacaaacggcaacatatgctgagtcgacatgtccgccaacggtccgggagcctgatactcggccgactttgacacaaaaagcgtcaactgcggcggttccatctctttcgtcttgtccggttcgagagcagtcggttgtttgcaagtgttgaccgagatgtagatcgtcctgctggaagcctgcctctctcccaacagcccctcctcttcttgttcaccttcaccctcacctctcaactccaaccccccccccccttcccgcccagcaagaaccgccaaaggaaaccaaaacctcgtcgtgctcccctcctccaagtccataggcgtagggtccgtgttctccagcttcaacaacccgtccgctgcccgcccaatgatgctcctgtcgaaccctatgaaatccggctcatacatcggcccgcccgccgggaggttgggcgtaaaatcgaggtcgtcatcgaatacaatcggtaacagccgcggcggccggtcgagctcggcaacggcaaagtgcggcgaaaagaggctccaatacaacaaaaccaacaagcaagacgcagcaaccgaagccgccaaccgtgactgcaacgggctcaggtgcatcgcgcagcaaaagtatcccctcgatgattggcaaaagttcattgtttgtttgggctgttgttgtgaaaatattccccgtctccggcgtggtggttgatcttcgaatgcgcacccagagcagagtagacaggcccctgtaggtaggtgaccgagggaggccgcccggtttatcgtaacatgctactactctgcaaaagggatcgtatagattcgaaaatgagcagcgtgtttgtgagggagaagaaatcgctcgtacttttcgtcaatcgtcgggtggttcgtcgtggaaaaaaaggttcggatgtgtctgtggtggtgtaagtgcagatagacaactggagcatcagcagccgtgtccaaagggttgattgatggttgccgcctcggcagcccgggcccttgcagtggcaccaaggaacgggctgccaagaacccgatgagaattgggacagggggcgatcccacagaattacgtatcctttcacatgaaacactgaaccaaaaaaggtccatgctcaccatgtcgatctatccaaaggatgatgccatacacgatacactccaataaatcccccccccctttttttttttttttaaaaaaaaaaaaaaaagaaaaaaaaggcggccgtagtgtaacccctctctcttctcatcactcctccctgctccatcccccctcctattcagcgtacatacacagtaaaatccaaacagcgcgcacgaatctattccggaaaaattgaccaatcccgaaaggaaaatcccacataaaggttgaatccgtgagcaccagtgtacctaacccctcccttgaaccctagaagataccctcccatcccaagccaccatgcatgtgtctatcatgtcgtctggagtttccaaccttgccgccgatccgcgtggcctgcgtcgtaaatcatgtccaacgtcaagaaggaaacgggcatctgaatgctttttgttgtttcacttatctcctcgaagctagctagacccccacgcaaagccaagtagatatctgctttgcactttcacaggagaggtccagcaaccgataagacccatttactcggtgtggagatcggccttcgcgcggaggccgctggcggtggagccagaggtctggaagtggcgggagagggtaggggcgaggaaggagcggaagatgatctcggcacccctgatgttgtggttagttttgggtagatgcggaagcaaggggaggcagcagcttacttgaaggaagggagagagagccagagaaggaagatgaacttgaaggtataatagaaaggaacccagtagacgacgctgatgaagctctccaggacgctggaattggttagtatcaatgtgtttttcggagcccgagttcttgggcatcaaacgaaaggccttacgtgaagaaagagaagacaacccagtactgcacaagatgtcagtcattgataccaaaactttcagcacaccatagacacttacggtcaaccattgggtatcatcgtgcttgtcggcagaaaacaaggcaccgagggagtagtagccggggatgacaaagccggcgatgttggtcaggagctgaccgccgaggttgaggaggatgaggaagaagtagagggcgacggagccaaggacagcgtaggccttggggacaccggtttgcttctcgaggttgatgagaacggggtacttggagagctgcgagacggtggtgtgagtacaagcacgaggcgcaaggcaacaacaatgtgaggggattcggattcgggcaaagacggaaacgcacctccttgtcgagctggccaacgtagacctgggccttatcctggggggaagacattgttgcgagttggtataatgcgatcgttgaagatgctgctagccggtgtggattgtcagaagatattcggaagaaggacgctcgaggttttaaggggccagactcgcaggtctgaggttgggcactgcccgagtggggagtgcttcaggagagtaggaacaggagaaggcccggcaatttcggcgggggagctctggctgggccacgagctcgtcgcacgcctaaaaatacccttttggatcttgacaaggccggggagggcagggaggaagaatgaggggcttacctggtacttttgttgtgaaaaaaaaagttgagtgaggtgctagtgatgggctatgttgcaagagcaaaagtgtgtttttctgtaactgtgtgtcgggaggttgggagctcaggaggtgagaggagccgatttgttatcagaatggagccgaacgacggtgggagggtggatgcaaggtgagcaatgacgactgatacgtgtgcacttggcagctctcttatcttgttttcaaactcgagtccgaaggaggggtagtcacgtgctctctttcatagaagttacagtcgtataggctatctccacctctgctgacatccaattctctggtttcgtggtgtagttggttatcacgtcagtctaacacactgaaggtctccagttcgagcctggacgaaatcaatctcatatcctttttggcatttctggttcagtcatttccagttcagatcttatctttttatcttgctcagacatttggatctgacctttcccatgaccacgctgtgatgcgcgtctgcacacacggcccgttgacacagacagcaggtgacagtgattgactgatgtatggaaagagacaatatgtgcctaatcgaggttattatcagctcaacgcgaaccgtgtctaccaagtctaaaattccaggcattggtcttctgaagtatacagctgcatacttgctcgcttcttgatgtgcacagctacccgatagatattgagaaacactgttcaggccaccgatgaaagatatcccagatcagaagagatacactacgagacggtatacaactcatgatatcagcagcatgtctgtctgccattgttttcatctcaaagacgacgttgttgtttctgtcgaggtcgtgaagcgagccaatggcacagcgtcagccagcaatgtggggggtggatgatgggtggtggtacgtgcggggaggatgaccacaaggaggctggagcgcattgccccgagcagcgcctgtgtttgttgatttctttctctcctcatcccgtggaaaatgcgcaagacttgctgagcaccaacgccgcttaccgcgctgcacgttccgctccacctgcacctgcaccgcgccgaacagacaacctccatatcgaatagatcgagtatcgcgtatccaggtcgcctttgcgtccatcatatctccattgtcgcaaccaggcagggtgtccatcttggtgttttgagctagctagccgacagaccaaagcaaagcaaagcattgcctgtcgacgaaagcggtggcaatggactcgacccacggtaagggacccatttattattagtatttgtttattctgttttgttcaatcgtcagagtcaaaattcgttctgttctaggactcgcaaattaaatcccttctcctttctatatccagatcctctgtcgcttgccaaggcgagaaagcggccacggtcgcgagcctcaacagcatccatgcatagtcacacaacacagcccaatatcgagcattcttttgccgacagtcaagatgtctacggttcctcgcagtggatgccggccagcgaccaccagcacacccacggcctgccacagctgacccccgaggacctgctgctggcgtcacagctccagaccggccgtgactacgccaacgagccaccactcaacgcctcgatgcagagcgtcgccttccaccacagccacagcatgagccgccagtccatctctgccgactcctttgccggcaacaccagcttcgacgacagccagatgttggaccgtgacgggaacgacgacggggactcgttcagcggcttgcagccacctgccaaaccagggtcgaggtcgagcgcaaacaacgagatggagatgaggcagctgttcaatgccagcaagcaccgcaccttgcaggacgtcgccctggagctgcatggaaacgagaggggcccaaactcggagcggacaagacaggtgttcgcgatgctttggtatgcacgcactgggctttagcattgatgatactcgacgactgacagcggtaggatcaactcggtgtgctccaaggggaagggctcggtaccaagggggcgcgtgtatgccaactacgcgtcgcgttgtgccacggagaggatcacggtcttgaaccctgccagctttgggaagctggtcagagttctctttcctgggctgaagacaaggcgattgggggtgcgcggagagtcaaagtatcactatgttggctttagcctcaaagaagagcttcccgagccagaggctgttaacacacaacaaacggtacctctaggtgacaatatgtctttcacgcaaaacttcaagtcagttttcaccccccctttcactttcacaaggcggccgtccacctaaccaaatccacagcacgctgcccaacaacgacgtgtcgacgagatcagaacgaacagcgtttcccacgccagatctcgggagtcaaccaggactcaaggttcctcggtctcgcgagttccagcacagtctctacaaccaaccgcaggtgtccagcttcgaccaactgcaacggacgatggacaagacggcgaaacggctcaaattctccaccgacacgggcgaggcctttaaacaatcagatccgctcatacttcctaggatcgaaccatttttaccaagcgggaccgatgcggacgccgccaagtctctcacggccctgtatcgatcacactgcacatctcttgtcgaatgtatccgttactgcaaggaaaagacgtttttccatctttttacttcgtttcagggcaccctcaccatgcccgtccagaagctcttttcacacccggccatcgcgccatggatcgaggaatgcgactttatcttgtaccagcgcatgatgcggatagtctcaggcctcacgttgcaagtggtccccaagcccgtcctcgacacgctgaggagcatatccgagaggctcgttcgtcacattagagagtcgttccacggccaaccggcccatgtattacgagccaaggaggcgcccgccgccctctttgccggccttctcgaccgggccttgcgagtcaacctcacggcccacgcggcggcaaacatgctgtcgaacccggcaaaccgagacctgatgtacgcggagttcatctcgatgattaacgttcgcaagatttccgagagcataccgtcgcggggcatggacgacgtggtgaatgtgttgctgacggagatgaggcacctgctggatccggtgaatgtcccctgggatattgagtgtctgactgttcacggggatgtgcctccgcaatcgaggcagtcgcaggaagctgttcaggatgacacgagcgcttctaatgtgttggatcggtgggttaacttcctgaggtctttgccggcgaggtttccgtatgcgtcggcgacggatgttgtttggtgtgcgcagcggttggggacggcgctgatgagggatttgacgattgggcaggggaagagctttgggagctggtgggtgacgaaatgctggctggatgagatggtggagtttatggctgagcaaggggggtttatgcagcagagggggtcggggggattgggggttggtttggttggggatgggcgtggggggctgagtgtggctaaacggggacaacagcagaatattggaggaggagggtcgaggtatagcagtgggagtgatgattttcatcatttgggggggaggaatggtgggggggagcatgatgggttgttgggtggggggcagccggatagggctgtttttcctagtggtcccgggacaggaggagggggccagggagggcagcagaatccggatgatagtgggattgggattaggacgccgggcctctctcacatagttgcgggccgagggnnnnnnnnnnnnnnnnnnnnnnnnnnnnnnnnnnnnnnnnnnnnnnnnnnnnnnnnnnnnnnnnnnnnnnnnnnnnnnnnnnnnnnnnnnaaatcgggtagggaggggttaggaataaatcatcaaagttgaatataaattacacgtgttgatttaccgtgacatttggcttgctagttgtattcttagtgatggggcatatcccctgccccgttctgaggaggaacatacactcagaacatgcaagatgaaaagcattgaaaataaaaacaaaatgttccacaaggctgtgtaaactgacagtttggctcgaatagtcacaccgatctaacccgtatccacagatctatcctcttgtcgctccagtcatcctctctaattaatcttcctcaccaccaactcccccctctcatccccctccaactccagcaacccacccgcctccaacttcctcttccactttgtgctctcatacctcgccaacacaaccgtcatcctcaacaccgactccccgctactctcgtgctccttcacccccccccccatagccgtaaacgtccacctcccaaacgcccaattcagaatgtacctcccgctctggctcttggtcacaggaacatcctcatccgaattcttcacctccccctccccacccacagtcagcacagccttaatcctataaacctcatccttcggcgccttcccaagcaaccccatcagcttccccgcatccaccccttttcctttttgcgtccccttcaactcaacactaagaacctccacctcattccgatgcccatgatcatgttcgtgttccccctccccatttccgccctccccttccaccagtccagcagcgagactcgaatccaaccccagcaaaaccccaacctcgaccctccccctatcactcctcaccctagcagtctcaacctccaaatcccccaaccgatccaccacctcctccaccctcctctccccaacaccctcccacttattcaacaccaccaaatcagtatacctagcctgcagcctaaccgtgaagctaacatcctcctacccccccaaattctcaaaataaatcaacctaaacaaccccaatccaaaacccactccccaaccccccggtccccctcccaattctaattaacctcccaaacccaagggggccgggaaacccaccccccgcccctcccccaaaaaaaannnnnnnnnnnnnnnnnnnnnnnnnnnnnnnnnnnnnnnnnnnnnnnnnnnnnnnnnnnnnnnnnnnnnnnnnnnnnnnnnnnnnnnnnnnnnnnnnnnnnnnnnnnnnnnnnnnnnnnnnnnnnnnnnnnnnnnnnnnnnnnnnnnnnncccagtctattaacctccatagccaacgtggcagggaacgcactcccgctcgtctcgatgatgaccctgtccggtctcgccgtttccctcagttctttcaaggcagaggataagctgcctaccaagttacaacagatacacccgttcagcagttccttaaccgaggagatggaagaagacgaggcaagctggctgtcgactgcgaggtcgccaaactcgttttttaggagcgccaaagtgtagtttggattcagggcccgcagttgggggaggaggttgaggatgagggttgttttgcccgctcccaaaaagccggtgaggatggtgatggggattggtttttgttcattgtcaccgttgggggtggtggaagggtgtaggtcgcccatcattggctgagagttgatatgagatgtggtgatgatggcaagatgtgtgattgtctgagtgaaaagtgagagatgagtttatgagcgagtagttatccaagtcaagaaaacgactcgagtaacaagcggcgacgtcggacaagacacacacacccaagcttgagtggtggcggggtgataagcgataagagcttggcagctttgcccctccatcacaaactacctaccatcctcatccttcgtgttccttgcattgtttacattgcctaaaacactgccctttacagcgtcatttcacgtaaacactactggccccgattcctggtctcatattcacaaacactagttcatacctacaacccacacaaacgcactcatcccatctcaaccaccaagtgacgtcatccaccgtgttcaaagatcatcgaaataaaaacattgaaactttgctcaacatcgctcgaactctgccaaaagaattccaaatgcttcatgtgtcgtgatacttctgatgagttcaatgcaggagcagacgaaaaaaagaaaaataccagtctaaaacaaaaagccactcgacgcatgcttgccatgccatcccacccaagcaacaaaaccaaaaaaaaaaaagaccacccttgacctcaccagacccctttttatcccgtctcatcctcaagccctctaggtctgcaaaacgtcaaggtcctcctcggtcggctgcgcgggggtgtcctgtgtcagatagtcctcgcccttctcaaacatggctccgggtccttggtaggatggcacggcaatcgtcgccgtcgtgctaatgctgggggagcgcgactccacggtcctgggcgtcgtctgtcccgtcaccagctcgggggcctctgctagaatcttctctgccgggttaggcttgatcggtctcgggctcaccactggaggcgagggggcaacataagtaggcgacctcacatcttcggatccgaacggcaacggacggtggggaatctcctttccatccacactaatgctctcctggctctggccggttccgctggcacccaacttctccaacaagacctcggattgttgcttggccaacttttggagttgagcagccgggtcctttttgtgtctcggttagtcaagctcgtcttgcagcgacagcataccccgatcatcaaatacatacccattcgtcttgggcgggaacgccctcggcagcaggcagctgttggccattatcatcagcgttggcccagaactgtcgcctcctgaccggtgcgggcgtgaccggaaggctcggacggtcgtcctcggtagggaagtcggttaccttgatggatcctctgcgctcctcgcttggctcctcctggcgttcgccggatgtcgatctgcctgggctcgccgccagaatctggctcctagacctgcggtgtctctgcatcgagtcaacatagcggttaatctgggggatctcatcccacgcgttgctttggttcaacgagttccaggcggttccgccgggagagggggcggttcggatggctggacctataggcgtaaacaatgggtttcttcttcccacaacgtgtcgtctttgctcaccaggagatttcggggccggagtcacgggggccaaggggttctcagcaaacacgcgggtggggcgaggcgcattgttttcccacgggaaaacagacttgggctgatcgcgctcgctcggtaccgagtaccacatgttgctgggagggctggggtagcggtcgggtgcctggaactgcgaagtgtctcttgacatctcatagtgtgtgcgggggaagtttgcggcctcgggcccggaatcggtcgggggtgagctcctctgggcatcccatcctgtttgcggcaacgtctcagtatatgcacctccagattcattcgtcaccttgggttccgcggaagtgtgttcctcctggtggatgtgatcctgactctcatgatggacatgatggtctccagagtgggcaacatgatcctggttcccctggtgttcctcttgcgagggggtaggggattgctgaccgttgggttcgccagtgggcacgacataacgggccgttgggttgtattctcccttgacaaagtgctgaacaatgctgggcgcgtgtccggcctgccccggagttagtgatttctttcggccgctgcggtccggacctacctctttgtggtagtgtctgtcgtaaacagcccaccaccttccggtcatctcatcgaaaggtccggcgtccgtggtgctttcgcgtccctgcctccacggcttgtcggctccaatgaagtgcaccatgttgatgctgccctggaagtggcggtaggcgggaacatattggtagtgagctgacggcgtgacgttgtaggtgaagctgaggcggttatatgtgtttccaaagtgcatgttcaagaggccctgatcggcgccgtcaaacgagatgccgcgttcggccatagccatcatggcatagtagtcgcccatgttgggggtcagggccatgacaccggtgttgaacaagtcgggccatccgatatcgggagccgccgagaaggcatgtgggagatcgaagagctcatccacggctctgtaagcaacaacgtcggcatcaatgtagacaatcttgcggaactgggtctgcttccacaggttgatcttggtaaaggccgagtggagatccgggcggttcatcaagaagaggttggcgggcttgccattgcggatgcggtcgacatagatgacatagtcgtatacagtctgcgcacctgttagaccactagttttgtgagaagtggtttctgaaggagcttgccttgagcgtagcgataacctcggtcgagacggtgtctggtgtgacaaggatggcgagcttcttggtggtgccggcatcgcgcaacgagtgggcaaggacaagagcacctggcaaggccaatgttagcacaagcattcaaatcagaagcatgtaggagcaaacccaccggggagatatgtgtccgtcaggaggagctattcacaatggctgttttagcatctattcgcaagctgcggggttgtcccatgtggtcttccacccaacactgtcgtctgctcctgatacaccaataccaggcgcaacaagtgatgatagcccatccaaccgtggtgaacgacatcactcacacttgcgtacacgtcctccttcttcgtgcccgtgaccatggcggcggtgtattagatgtcgaaccttgggggagcgtatgtgcgtggcacgtgatatgtgttgagcgataatggtacagaacagggcaagtggaagatagcaaagcagaagagccacagacaacaaagacttgaagaccaaaaataagaacggacgaagtttgtcgggcccgaactggagatgtttaaaaatgcaggcaggatgtggcaggaagactggacgaaggcgactgaagaggatggaaatggagctaagcagcttccctagcttgttgtgccgcaagcgctaataattgacacccctgacgtctgccccatcggttattatcttgggtaccctaccactaccaccaccaccatcaaatcaccttttgcctgaccggcccatggcgatgtgcaacccaacggcaccttttgataattccttcttgcagcctgcagcatgcggcagctcttgcatcgaagcagcagggcccggtgcagagcagcggggctaccgcaggtcttcttgtcgcgatgatctgtttggttctccttcctgtgatgttacggccctcaagagagtggacatcaaccttgggcattttgtatggctttttccagcgtctttgggtatcaagagacgttgtaaccaagagcccagtgggagatctcgcctgccaagatttggacgtcaacaccgtttttgatgtttcatttgcgagacacctcatgggtggtggcttgcagagcgtcccttctgcgcgtctgcagcatgccgccactggtggcgtgagtgctataacgacgataacgttggctaccgggaaagttttgtttctcagtatagtttatgtctgtagctgtcagcgagaactctttgctttctttcctacatcagccctccttctctaccaaaaccttcaacaccaacccctcccagtcccagctccccttcccagcccagcagtatcgctaacactttccttgcctgccgggatcaagaaagcaagcacttggcaggcgcccagggctccaccatggcgttgggcaaagagatccagtggggccccttcaccatcaaaaagcggagccaattgcatcatcaaattctcgctcaatcctaccccgcggccaaatgccccgcattccatcgcatctcaccgccaagtggttgtggtgttttttatcaaaccaaacctccacttgggaactcactcctcagccgcttgggctgcaatctctctaataacataccatgagcgatatcagaaagaaagactcactcacatagcatagctacccaactatcacccttcggctcggccgtattctgatgctagttagccccctcgatccatcccaccctccgcagttacagccagctcacactcgcagctgctctcgagtgaggaactccactcacccgtatctctctcctctcagccggcccactagagagttggaaagatgtcgaaacatcagtctagacaggctccagtcacacgtggggggaggcaatggcgatggtgttttgcggttgagcccaaacgctggacgcgcggtttgtggatggatggatgtgagacgatgaacaatgacccctgagcccctgagcacaggagcaccctgatagtggaaacgtttgtgaggtcttttggggttgggcaactgcctcctggattagaagaccagacttggtgggctggatctgctgtggaaggttgagcagttctggagaagacagaggtcgtagggtattgtctgggttgaagtgtgcggtgcccgacgaagagacctgaatgcgtctttgagacatactggaccggcaccggccccacttaccggcggacgaccaaccacggactcggacccggcagtcggttggaacccaagagagtttcggccggtcgagtcttctcacgggcagaactaactcaccgacactgatcttcataactggtgactctacgacttggtgatatcaacagatcagcctttccgaccttgcgtcactgcagctactgcctctctgtcatcgttttctccaccgatccgtctcatgtgtctagtcacgctagtttatgacaccgaggcagttagttggctgcacacgcaagtcaacgatgatctgccacaaagaggtatttgctacctgcccagatactggacacctcactctcgactttctcacttcataattcaccacttgcccctgtctgttccaagttactccatatttctcgctcgcaaatatcccggaccccagttcactgttgtctcacttttcccaccgtcctcaccacactcatccatgacctacatcttcaagtgacacaatttccgaacgcggcttggtttttagccatatccattttgctcaaccgcttctcatcatccaagctcaccacctctcaccagtccctcactcactccgactttccttaccatactaagcaagcacggcaccccccatttcaacgtaaccaaccccatgatgagaaacctactctactgccaaaaacccccctggaccattgcatcataacaactgtaaatttcatcattataacctcaacaagaacatggcattttcctcctgaaaaagccttcccatacaaaatgatatcgtacacatgccctctccccccctaaacctacatatccttcttcaacccatgctccggcttatgcgtagtctcataatcaacatgcacatacgcccgttctacatccggcagctcctccagcttcatctgcagcgcctccgccacatcatgcgtctccctcaagctcgcctcggcatccatcaccacatccacctccgcaatcagcctcggcccgctgtgatacgccctcacggtatcaatctgcctaatcagcgggctatgcgtcacacacacatacgtgatcagctgctgaacctccacactagccacaacgcccaccaacagcaaaaattccgtaaaagcagtcctaagccagagaccagagatgacgaccgacaagaaaatcgcaccagccgggtccaaccaccagatcagcttggaaccgccaaccgaagtcaggatgccaaacccgttgacaagaaggtcgttcctgtggtcttgccagaggatgcgcacttgggagtacttgtccttgatgccccaggtgtagaggaacaaggtgaactttgtcgcaaaggccgcgccgacggcgatgatggacgggaggtggaaatccttaagttggtcctccccgttgtgctccgccaagtccctcgcggcaaaagaaatgataatcatcgacacggctgtcatcaaaaagcaaaagacgatattgcccaccgtttccagtcttgctctcccggcaggaaaccggttcgggtcaactctcttgactgccctgttggtgagaataagcgtgacgttgctcattgggtcgaagatggcgtctgccatggtggtgaaaagagacagcgacccagacgagatggcggcgtagagttggaggacggtaagaaccacgttggcagccaaagagccccagacggcgatctggaacttgaggtgatcttcaccgtgctcctgtttggcttcggcgcggtgttcctcgaccgtcttgagcattcgctcgatcgtttcgttttgcgcttcataaaacccgcggagctggcgggcttgggtggcgttgcgcccaaagggcttgatgtatccagagaacttgctgcttttgttggagcccgagccggagctggacggggcgtctcgcttcctggacgtgttcgccttgatctcggcaagttcggactcggtcttgtatctttgcgaaaggccgtaggggtcgttgccggcgccgacaagggggaagcggcctgcccgttgagattctacctcgacatcgtcagggcggtggggatggcgggcgacggtggtgtcatcagcgccgtcggtggcttcgatggcggtgctgttggcgccgtctatagtcattctgttcatgggagcggcgggggaggttgcgcgcgatcgggacagtcgaggggtgttagctgtctcggactgggtcctgaacgcgtgcgggtggaaggagatgctggctgatagatccggctccattgcgccctgtttgacgaaatctcgatccccggtgtcaaagttggaaaaagctcgatggaaaaagctgcggtatttccttcctgatgtagagatgaggggccggggtcgcagatggtaggttccactcgcgatgtgtcaacggatgggtatcgcgatgatctgataagatgaacgcgtggagaaactgtcgtgggccgagttcaaagagatgggatgaacttccccaacctttttcgatggctaaagggaaagggaaagagagagagagacagacagacagaactggggatgtcgcagacagacggtcttgtatcagggggggcgtgttgttagaaccgtgcgaacccctacctcagcttcgaaacgtgtttagcaagatggggtttgcgtctggactccagcttctcggatggttgatcctgcccgcacggtgtccaccgtgcagatgtgatttggcaaaggccgtcgacagctgctgcaaacgaaatgggcgatgcgacgcttgcgtcgggcgcgctgcgggatgatggccgggggaataggaaaaagaactccgctgtcggtgccggcggggagcttcctccaacgactgtccggggtcattcattgtgatgagtgagcgtcaaggctaacaagtgctgcgaggcgcatcaaacgcgggggggcggttgaaaagtatcatattttttaaataaattttttttggaaatttctcttccatatcttcatccaggtgacgataaagtcgatgttgaggctgaacagcacccgatgatggacgacatggttcgatcgtttcgattgaccatgggtgtttcttcagtgggtttaaggaggcaacagcggggtcggtgattggtgttgatgaggggccgatgtcttcattcgcagcttggtgaggaggcctcttgaaatcgtcgagatggcattcaaatcgaagctcagatgtcaagcaattccttgcggagggcgtctcccacttataaaccgttcatgcatatggttttgcggggccccggacatgagtcgggacagctcggaagcaacagggcacttcgcgggtgactgccgaagccatccccgacatgccaagacccactactcactgtgtgtccgggtgtacactcgggcaaccctctgtagaacatcacttatcattacgaggtaggaatatccaggaaatacaagagacatatgctcgtgacctgacgcagtcccgcgcttaaaccaacctctcccggcaggactacccaaacccatcaccacatcattcaacttcattaccccaatctgatcgtcaaagcttggcctccgtcttctggctcccctccgcctcaacgggcaccacagcctcctgtgtttgctgagccttcggtgtctccccagccttcttcaacacctcctcccctcccccagcccgttccaatatccaaccagcgacatcctcaaaaaactcgccactacactccccatcacaatgcagctgatgataccacccctcatacgccctcagcgtcctatccttcaccccacccgcacacccctcaaaccactgcttcgtagcctcaaaccaggtcgtcttatccgccgtcccatgcccaacccacaagctcttcaccaccccctccttccccagcttcgtcctcccctgctgcaaatcattcgtcctgtccaacaacccggcaaaaccctccagcgtgcccgtatcatgcatcagctcatcctccttgatactcacttgcacatgttgatccctcgtcagatgctcgacagcaatcttgtgcgcaagctgaaagtgcggcatcaacctccccgccagtcttccaactgtaatcttcaaccgagacggtctttcctctggcgagaacccgataaacggtgcttcaaggaggagaccccgaaccttctccaccaaggactcatactttgggtcagcagcaaaggtgagaacttgtcctccacccatgctgtgtcccattacgaagaccggttcttggctcccgggtgtgccgagaagatggggctgtgagaggaaggcagcaatgtctgagagaacttgcgctgttgggcccgtgagacccctttcggcaggtttcttgactgaccggccccatcctcgctggtcaaagccgtacacagcgattcctttggaggcgaggtgggagaagaaggctgggtagcggttgatgtggtctgagaagccgtggatgaagactagcctggctttgatgggtccatcgggctatgaggtggttagcgagggagtaatgcgagtaggagaagggaacaacggacaagccatgacttggtgtagagctctgctcccgagacggtaaaggtgccttcttgttcgaggaccattgtgaagttgtttgattgactaggtaataacaatggtggatgtgatccgagattaaatgggaatgaaatagcaagaacaaaatcaaaagaagggctgggactaaagaggcatgatggacgacacgacaagacatgatgacattggtcgctttgtcggagggcgttccatgtggggctgggctggggcttggggcgcaggtcatccctcgttcacgtgccaattattcaacctcaacccttcgacttcaagagttgctctttccctgactgcgctgcctgagctccttcctgcagattcccaagcaggcaacagctgaccacctcaatttaggcggaaggcacttacttgactctcggcttcttcttcggacgatgcctgattttcaccatgcaacttttcaatgcttacattcttcaatccgatacaaaaccatctttggaatcatattcagcgccatgtagttcgcgttggttggcgatgacggccaacagccgttcacacgagtataccgaccacgatctcatggataactcaactacctagtattccaattggtaccgaaccaagtctcgagttccaccgccacccccaattattcgaaaagccttggcttcccctgaggcttcttctcacccttgggctcctttgtctcctgtggcttctgcttgcccacagccgacgacgacgtcctgtttccctttgaagactcgaggagcagttccgttccgcttggcgttgctcccgcccgaccacgcctccaagaaaccaccagtattctccgcctccaacagcctgtagtcccggttataagtctccgaagtgacgatctcgtaggcaaggcagtaccctggccggcttcctccacgggtgaggtccgcgttgtcaccagagcacgtaaagttggcctgcttcaaggccagattacactcgctggcttggagagtgtggttggccatcaggcttgtcttgtcgcactcatgcctatttgggtggtctgtccagttccgcgcgctgatccaggttgggactcggtgttctggatagtcgtcctggggggtggccactaagaagagatcggatatgcgcactatgtcgtccttgtttgcgtattcattacaaaagtactcaatggctgattccacggaaccgggagtgtagtagttatcacccggagcgtctggaccagtcctccgtgcgcccggtgacttgagaggacaggaggcgttggcgagctgggcagttgtgtcgagatcgaagtaaaagtcatgatcgcctgacgtggccaatgccggggcttgaacttctatgtcggtggtgttggaaatgttgggctcgggttcgagaaactgtcaggggcacttttcattcctgagcttgtcggaaccgggtatcttgatgccatttgcagaggaaggcatcgagagtgcctacaccgagggaaccgtcgcaggtatcgcataacaaggggtgcggccgttcttctttgcttccatcgttcaagtccacttttgagactgggcagggaggccaggtgcatgggcagttttcgagactgttgtctacgaggcacgttccctggagatttttatcctcgcccactcccatacaagcctcatcttcgcaaaagacgtcttcgactttgaggcacacgtcgcaagggcagttgatgatgggctccttggtgcaaaggtcgaggtaattgccttcgcagtcgggcttagggcattcaggcttgtcgtcgggacagtcgtcgtcatccgagttagtctcagtataaatacaccagatatttcttctcacagcatcatcatctctccgcatcactcgccatcaacaagagacagcaatttgggccttcctcttcctctgggccttgggtcttgcctgtctcgcaaccgcgctaccccccaacgagtacctttactggatatcttcagaatgctacgatccggatccagacttcgcaaagtacccccaagaggccttctacatggccggcagtgcagctgaacggctggccgatcccaccgacactgacttccacaacgtattctgggctattttcaagaccgaggtctccgaccagagggggtaccactacccgcagcttttcgaggccgtctatggcgaaacgaaaatggcagcaagcgccatcgttatggaaaacctaaacagtttgggcaatgaatagaagaacaccaccaaccgcaaccaagccaaagtgcacatctgtacggacgaatccatcccccttttcactttggtctttctaatacatatggctctgttaacactattagaccgcgacgaccaggaccgttacgaggacacacgagacccgtgcaatatgtggtatgttttttttctaatcttaccaactatccttccatccttccatccttccatccttcccatctttctaaccactggccagatatatcaaaatcaacagggatgccgtcctgcccgtctttgccctgcttcacgagtggatgcatgcgtttaggtattttagcattgattatccccatcctgacaatgagcacacggcgggttggcagaatgccatgaggctggatacgcagtcgactttgaggaatgcggagtcgtatggtatgttgagtgggttgagttaggggggggggggggggaatctggccgtttgctgacttgtgaatactcagcattattgggactcatggcttcgctcgcgctgatctgacgccttcgcttggtgggatcgctgctgctgggggtgagcgcgcgggctacactcttgactgggcgtgggcgcagcggctgaacgatcagaagtggcaggcgaaggttccggatgctgtggaggagggcggtgtttggacgaacccggtgatggggggggggagttgtcggtttattgtgatatcacggggacgaggcggacgaggggttacgagtagggggggctcaaagacatgtgggtttcaagcgtaccttgcgttgcccggggtttcctgtggtttttcttttgattttttaagagatatggttcgggagcattgataggagcaagcaaagcttctggtagatggcccatctcacgccgcacggtgagtaatggagagcgagtttgtgatgctggtttgaattgtgtgtttttctggcgttgacaaatctgtacctctacctacttgacacacccattcttaaagccacttcatcctcctcaactccaactccttggccaacctctcctttgacccttccttttcccccgcggtaacactcaaccctttgttctccgcttgggatttataccccccttttccctccctcctccccttcccctcagttgttacccccgcaaccccaaaagccggcgttggttttagttgagtaggcgtctcgacgtcatctagttgattccacccatcatcatcatcatcatcatcgtctgtgtcctcacttctcctgccagtcgaatatttcgacgaactccagctcttttgctttgtggcaaccttctcggggcccttggtggtgacgtcggtgtcgtatgcccctttttcaccaccgccatcaccaccaccgtagtggtcgtagatatcgtcgaggtaatcaccctgcccgtcagattgtgtgctggactgttgttgctggaccccaaaccgggattgcagaggtggttgggagggataactgtgttgagactgggagcgtctccgagaagaagactttttaggcggggaagggggtttggagtaggagtatggataaaaaagggagcgttcagagggggggatccaatctaacgagggtgcggttgattgggggagggaggaggataaggctgaggcgatgtgggaaggggggtattgttgcgggggttggtgggcggtggagaatttggatacgagggatggcttggtagggggttgttgttgttgttgttgttgttgttgttgttgttgttgttgttgttgttgttgttgttgttgttgggggttgtttaacgaggcaggggctcggaggggagctgatctcgggggttgggaagggggtggtgctgggcggagggggagggttatctgcggtgggggggcgggagctggggagtggcttttgggggttgatgctcctgatgagtcggaggagtaatcccgatttaggtggtcgaagcgggggtgttggtggatgtggactgggggtgggatacgttttctgtctcgttcgtggctggagggtttttgtggccaggtcggatccgctggagaggacgtcctcgcccctcgtctggatgtccctgttggcggcggcgggggggttctatatcgtcgactccctacagaggctattgactctgatagggtagctagtgcttctggggtgttagttcctgagcgtttctgctggctgggcgaggaccctgtactatctggcgatgacttcaacgggcggcgcccgagaagctgtctgccgatgacaccaaatatcgacggcgaggcgggcctcctatccttcagcttgggcggcgccatccaactcccttcaaaggtagtcaacccttttccgcagggtgggttcgggcaggtcaggtaagtcctgttaccaagctgacatctgcaatacgggcactggccccgacgcacagcttccgtggtctggattttgcattctctaggcaaggaatgtgttgccgctgctggtacccgaggaggctcggccttttcccttccccttccgcgcgagatatctctttccaccacgccctctttcaccgatggcggagtgacctgctgcaaatacctctgcctctccttgctcttgttcggcaccagcggacgagggacaggtgattccaaatacgtcctgtcgttatgctcactgacactcctccgagcaccccgtgagccttcttgaaacgagtcgacgtgcacctcctgactcaacccgctcggagtatagatatgcgaatgccctcgtgcgtgaggttcgtgatgttgagactgctgaaaccggcccgggtgacctccagtgtagtcaggaattttccagtacgacctcgccggcctgaccttttcttcttccccttcactatcactatcctctttgacggccttgtgccagctcgagatcgtgtcgccgcactcctcctccgacggcgcttcaacaggcgtgatgatcctgtgtgggcggtccggcgtgtgtaccatgcgaaactgttcagcttctcctttgtcctcaatccctttggaacgcaaccggctcaagtcgcgaagcttttgagagaggccgatcggtcgagggctcggtggttcgttgggcattacgacaaccattcaggggtgaacacatatgagttgaaagatctcagttccaggttgacgtccgagcattttgatcaagttcatgcagtggcggagctgaactcgagatgttcctagattctctttatagcagccatgataccaagtacagttttctttgtgcaaagcctcgactcgtgattgtccccccttctacttcagatcaaaaacaaagaactcccgcttttgccatgctgcgtacgcaactccatttgcgtcatgctacctcggggcccgccatgttgctccatcccgacaagtccgaagacaatgctatcgtctaaagactgacggtcactgtcatgttgttgctcagaaccagcaaggtgggcggcaggccgttgcacaacacctcgacatcagacagatatgccagactcgcctcctcactttgacaggtgttctcttcgggaataggaagtgtggtgaacaagacagccgtgtccttgctttgcttatgcatcagctcgttgagaatcaaatgctgcgcgcggctcgggagatcgttgaatgacaaagccaacccctgagtagagtagctcgagccgttattgttgctggcgtcgtcgtcaggaagctggtaagagtcgagcaagctggcaatgttgagtgaagcgtcgccaccattatcctgtccctttgatgccgagttccgacgcgaccttgccggggacttgataccctctgcaaacgcaacctttttatcggccacgttatcatcgcttccgagaagcggtgcatcctcggccattctggctgacaaaccgataactgaaccttgtcgggaaaaggcagggctgcgtgtcccagaatcttcggcaaacatgattcttgggccggtgccttcctcgttggtgattgtggtctgagggacgaggttgctggagaatctcattgccgtcgatccttggcgcgccaaagggggtctttcgggcttcaagatcccacgcttggcttggggcgatgttgaccgctccccaccgttgctgggtcggttgacgcttaggtcactcgcagtccgtggaaccggtgttattgacccataagaccgcggtgtcgatgagtgcgaaccctttggcctcctctctttccttgggcttcttggtgccggggcgagtacatctccgtagcttcttcgccggcggattgtcgcgaggaggggacgccttgtgccatcttcaccctcgcttgccacactgtccgcgtcattgaacgtcccgtctgcgccagccgtgccggaggagtcgctgtcgctatcgctatcaatgccaatatccgagtccgagctgtcaaagacgttaaagggcaggttttgtgtgtgaatgcccatgctgatgcccatcttgaccagctgcgacactgtcggcttcttgggaagttccgtcagctgcgccaaactatggcgccgcctttcgagtccttcctgcggcggggcatggggattgtagagtcccggccgtcccgacgtagattcaacgacgtgtgatatcgaggcaaattcttgtgagcccgtcatcgaccggctgctgcggtagttttgcaaatcctcccaccattcttggttcttgagacactcgttaaccacattatccgtctctggactcttgtaatggccctggatgatggtctcgtaagtcgagaggtcaccagaggcgagccaaaagaccaagatttcggcgtcgattctgagcttgttgagcagcgtcttgagtctgaccttttcttcggcgacctcgctttcgtattcgacaaagacgagcactcgaagcttgtgtgctgctttccaagcgggtacggtgtgaaggatgaacccaagctgaagaatcaatgtgtctgtgccggtcagaaaggatctgtctccacgtgtcagaggtggtgtgtgacttacatgtgtcaaaattggtggtcaaaacgctctgaccatcagcactaatcgcagcagacatctggataggccacaagtcgatgtacttcttggtgttcgtcttatccttccgaggcgtttcaagcgtatcaaatcctttgccaatcgcaacgttcagacggtacctcagagccaagtcttccaggatcgtcatgtaactcgtggcagacatcatgtcttcagtcttgatcgcatcggtgggcaacgacccttccatcaagcgcgccgatgtgtctcctctcttcctcctgcggaccggagtctccgtcttgtcgtctgtccgggcagccgttgcgggggagatgggcgcctcaggaacctggagggaggactgggagcggcgcaagtcatccatgttataaaatccaagcactgcgatgttgggcctcatgccccctaggcctgcagacaagatcaggtttctgacaccccaggtgatggatggagacatggcgagctgcacaaaggccttgatccttgagtattcggagatgtacttggaccaagccgtttgttgcatcttggcctcgttgacgcccatggtgaagtcgtcagtgacgatgacatggccgaggatgtagagggagcccttcttcatcgagttgcagaactgaataaggcgggtttgccgtctcgggttattgatgagcaggatgatctggggtctccagaacttgatgtgctcgggcttgagacgtagcaggtacttgcgcacttgatgatagatcaagttttgcgaaacgtcaccccagtgcttggggggactcagatagtgaatcagcaggaacaaaaagaccaagaggcagacggccgtggtggcataggtctcatcaataaagaacatggcagcggccgagaggatgctgccaatgaaggccgtttgccagttgaagaatttgaagcccggtctgaagttgggcgccgagccaatcttgagaaggaaacacgcaagattcatgacgaagaaggtcatctgctcacagtcagaattcttccctcactcaatgacggcagcctgttctcacctgatatcccatggagatcaaggtggcgatctggttaaggttggcaaacatggccatctgggcacatatgtaggtcaaaaagatggcaacgataggctcgtccgcctttttcgtccccttgccgaatactgacagacccgggaataacttgtctctggcgagagcttgcatgagctttgcagagccaatcactcccatgagggccgagaagaaggtcgtggcgaactctccggcaaagatgatgggagggtagacatttgtttcctgaataacgttgccgttccggagaaacgagctgtgagttgtgctagacgccaaagaaaagatcaccagcaagtaggcaatgagggtcgagaacatggcccatagtgttccacgaggaatggatttgctggggtttcgaaggtctcccgacatggacgcaccggcaaagatacccgaagttgccggaaacaagacaccgaagagacttctaaaagtatcaaaaccggcatactccatgccggtagtgtgtggaaagaggtttgccttcagggttgcaagactcacgcccgtgaactcgatccccttgtccgcatcaatgaaggctgggttgaacacggctgagaaggggatgctgaggatggcgacgacaagcaccaccagaagcgcgttgctggctttggcaaagatggagcttccagcaaggcaaagcccagtgcacaccaccagagcaaccgtctcaaagagatagtcccaccagtatccatggggcatgacatcgtaaaagttgagtttaatgcagtcaataagaccgacaacgttgagggccgtgttcaagacctgagcgaggtagaagagcaggccgatagagccgccgaactcgggaccgagagatcgtgagatgaggtagtaggcacctccgcccttgacctctccattggaagcaatagcggagagcgaaagagtggtcacaaagtctacgagataggcaacgagaagcaggcctgcgaggcagattagcttcctgggcggccgtccatatcatgtccataagctgtacgcaccaagcatgcccagtaggccgatttgtccaagaatgagaccgaatctcaagaacatgagaatgctgagaatattgaggcataccgggatgtagacgccggacgtgacgccgagcttggtcctcttgttgagggcttcgggttccatgatggcggtgttaggtagatatcatgtgtgagctgaggggatgagatcgttcaaagaaaaggtagaaagaagaggtcataaagatcatcagaacatgccactcatgtcacgctctccgtccccgccgtgagagttgaagaggaagcgaagagggaggaagaggtcagggtcctgaccagcgccgatagcctagatgtaagaagtaccccacagcccgcattgcttgaaaggtcatcggcaaacggttgcaatggcgcagatcatgcggtggggaaagtggacagaagtgcaggaaatggagacgatggtctgaggttgtcgcaagataagtgctgttcaaggttggccctcgaatgtcgcgatatctgctggaaagatccccgcgccggaagaggctcgaggctcgtgttaggagtggttcttgtccgacaatcgctggctattaattggaggacggcgacgtcattcgatacaagcgatgtacccaacaacaggcagctttggagccattgacgaatgcctttgagctggcgctgttcatggtcggtcgcgactttgagctcgagagacttggcacttggcagtaaacaccaacgatggcggggtggttgatagggtgctatctcagacaggactaagatgttggtaaaatttgttagcgcaccaccatcaacagcctagacccaaattcaagatccaccccaacctctctttgaaagaggggtttgatacagagacggtgcgattcctatcgctccctgtcgtcttttacgtgtagccgttgcatcggtctacctgatgggtaagggttggttggttccctcaacatccggccttttaaagcatcggatgcggacagatatgttgagactgctgcatatctggtgtctggccaaggtccatagactttctccgcactcctctctcttgtggctcggtttggatagcccctttacagattcaaagagagagagagagagagtaggtatgcaacagttgaagaaatgttggagaggctggttgacatcggtatccatggtggctcagtccagtctgtgctcaggaacggccctggttatcaaggtgtcaacggatgttccctgctgaagttgtatgtcaacaaagccttggggcagatagtagtcctcaacaactgacataatccaatcgagaaacaggtaaataatccatattcatatgtaggtagccatatccatatgatgcgtcacagcgagccaaagttggacagcttggaattgtgtgggcaggtgactgtggttcagggtccaggctgtttcacgcagcggagtgtgggggccttgctggttggtgggcccggcggaagccgctcaacaccgtcaagctccaactgctgtcagcaggccgcccactgccgctgattgtcttgcccccaattcgttccttatcgctggtgttgaggtcacaagcccatcccacgccgtcgagagagagagagagactcatcaaccgcccagcctatccgtaccatcccctcttttcccccggaccgttgtcctcttcccaaacgttgacggcaaaaatcaattgctacctcgaaccatcctatcgagtctcgaaccgttgtttgtctcgagtcccacgaagcggcgtttgcggcgttcgctcagttcaccgacgaggtcaggtcaccaacaccagatacccaacctttttttgctccaagacatgagatagaaagtggtcacacatcatcatagatcatcatgtcaaataccggaagggattctccggctccggctcctatacctcaagtctcgacttcacccggctcgtttcgtgccaggtctttcgttggctcgatcccacgcgcatcatccactgctcgacttgcctcaccggctcgcccatacaatggctatggcacacctcctgccgcacaaacctcaccaccactaggtgataagggagattcagacagtttggcgcctctgcctgggcctggctcgcacgctgctggcccaggtatctcggcgctggctgcggcattgtcccagtcgataggcacttcaccaccgcgtttcggcacgcctcctgttcgagccctttcgcccgtcccgaaccgctccctttctcctgctcctggggcagcgccattcccagcgtcgggtacttcgccatatcatggctcctttgacgcaaggcggaattattccggcgcgtatgaggaccccgaaattgtcaagaggcacttggttcagccaggcgatgctgggtccgatgacgggtcgaggaaactcagcgatggctccaagggaaaacagccggcagaagatgactttgacgacgagttttccagtctgaaactgcagggcggtgacatcactaggccaatatacaaatggaccgaagaggtggaacaacgaaacaagatgcagcgcagcaagagcttcagcacaccgcggccggatcctgaaaacgagacgcttgatatcaacaccatcaaggttcccggaggcttcagacgcaacttcctgaggcgcgcggccggggatggaccagtcaacccggatgacaccgagtacggcgcaggaccgagcgaccgacagcagccgccgaaactctttaccaacagcttcctcgagtttctctctctctatggccacttcgccggtgaagaactcgaggaggatgacgaggtgctcaaacctggcgagtacttcacgtcgggcagcgaaagtaacctgttcgatgacgatacagaggacgagcatgagccaatggaagacagcgctttgctgccaccatcccggcggaagagaaggagaaaggagcgaggtggaagcgggacaaacagtcccatgggcgcggcgctgctgcttctcaagtcctttgtgggaactggtgttctattcctgcctcgtgcctacctcaatggtggcatgctcttcagcaacttggttctgctgtttgtagccgctctgagctactactgctttgttttgctcgtcaatacgagattgagggtcgagggctcgtttggtgatattggtggcattctctacggcaaatggatgaggaatctcatcctcttctcgatcgttttgagccagatcggcttcgttgctgcttacatcgtcttcacctcagagaacttgcaggcattcatcttggctgtgacggattgcaagacgcacattccgatcacctggctgattgtcatgcagatggtgatctttttgccattctctctgcttcgcgatattggaaagctgggcttcacggctctcatcgccgacgccttcatcctcatcggtctggcctatctgttttactacgacattctgacgctcaacacccaaggtttggcagacattgtcatgttcaaccagaaagactggaccctcttcatcggcacggccattttcacctttgagggcattggtcttatcattcccatccaggaatccatgcgcaaccctaccaagttccccaaggtcatgggtattgtgatgattatcatcaccactctctttgtcgtcatgggcgcggtttcgtatgccgcctacggatccaagactgagacggtggtgttgctcaaccttccgcaggacgacaagatggtcaacggtgtacagttcttgtattcattggctattctgctttcgactcccctccagatcttcccggccatcagaatcacggagaatgcgctcttcaccaagagcggcaagtacaacccgtatatcaagtggcaaaagaacgtgttccgcttcttcgtggtggcgttctgcgctctgatcgcctggggaggagccgacagtctggacaagtttgtggcgctcgttggtaactttgcctgcatcccgctggtgtacatctatcctgtaagttctgatgattcttcatcttcttaaaactctggctgacgagatatacagccgatgttgcactacaaggcagtggccaagacggcgttccgcaagtggtccgatatcctgctctgcatctttggattcgtggccatggcctacaccaccagcttgacggtcatgagctgggcctcgggatccgaaggaggcggtgctccgggttactgtgactcgaaggggcacgccttctgaatgaccacacaaacacagacttgtgcacatacgacatgacatacacacgagacacacacaccacacacatacacgaacagccttgctttctctgttttgaataactgtttagcgtcaatcgtcatggttgaatcatagcactatgcagggtaggagggttatggagtgggagggcaggtcgttttggagaagggtgttttatttttattttgttttatcttttagggttgcatcattggtattacttggtagattctatttgcttcaactagagcagcgtgtaagacatgtaggtagttaggtagtagaccacatacatcagactttggggggggttgggttgggagggttgtaatgtgatttgctgaggaaccagactgaatttcggcgggcgagggatgttaatacattgattggtcttcaaataaccatgatttaatctgagctgcttggtgcaagtgaatgaatataaaggtagaaaaaggaaggatccatggatctggaacaatggggcgtgttgagtgcacgggccacgcgtttgcctctttcttgtgaaccttgagtggaagtgaatcagtctttggtttacaacttcatcaaaacatcattcacattacattcgccatcgcttctttttttgctatcttggtttgctttgaaagggatataccgtacactttaaagagagttttacatcggttttctttgcggcacacacacttcttttgatcaacgggatcttttcttagcgggttgttaatcaccagtcacgatgaacgccccagacaggtaagctttttgggtttgatgaattcacttttgttttgttgcacaaacacactaccttttgggggatgaggatgaggatgaggatgaggatggggatggggatggggatggggatggggatggggatggggatggggatggggatggggatggggatggggatggggttggggttgggtttgggtttgggttgggttgtagtttggcgtgtttgattggaaatgggacatggtggaggatcagtattaaccttgctgannnnnnnnnnnnnnnnnnnnnnnnnnnnnnnnnnnnnnnnnnnnnnnnnnnnnnnnnnnnnnnnnnnnnnnnnnnnnnnnnnnnnnnnnnnnnnnnnnnnnnnnnnnnnnnnnnnnnnnnnnnnnnnnnnnnnnnnnnnnnnnnnnnnnnggagaattctaggtcttgttagttatgtgagttggtagggtgggggaggtggtggtaagggggagagagagaggtacccttgtcgcctttcatgatgacccagatgcgggagccgacgcacttgtcgatgagttctgcctcacaacaaccaacattagcaagtgtttttgggattggtgggaggaaagggggggaaggtaacaccgagggggaggagttgggaggccatttcttgtttctgtatcttggtctcgtttgatgtttgttggttcaatgtgagtgggttggacatgagtttgagttgaagcaataagcagttgtgtgaggtgggcgagcttgagctgtagttgctgtcttggcaaagtcgtaattaccgtatttcggttacagtatgcaagtcccgtgatatcgcgtaaagcactcaccctcgtgcttcggtagttgcatattggtcgatccatccttctccaaactgaacaacctaccccaaattcaaccccaacccgcccaaacttcggctcccggcgagcatttctccaatcgctaccttttgggaagaactgcccctcctttttaactctttacctgtatggatagcgcgtttgtcgtgctgcagtgttgcctagattgtggaccatggcactggcacacatgacgcgacttctcctatcatgttttcttcgatcaagtcctcctcgtctaacactgtgagacgtttggtggggaataggtatttgtaagtcttttcatcgttgggtcaaggattttgggcctgactcaggttgcagctataccactgtgagatgtgctgctggaaggggcaggatgggtgggagaaaccagcaagtatgggattctagcaggggggttgtttttgctgggcagagcagggggtttacgccttctctgatgagaccaactgaggctggggagcggacgacggtggagagggagacttttgagaagagtgttgaggagggaggggaggttgctgaggagagggtggaggtgaaggttgaaaaggtcgagactgtcggtgttacgggcgaggagggacaggaaaaggctgaggatggggagaagaaggttgaaggtggggagaaggaagaaaagcgcgaggaagaagtcctcacaccaccacacacacccctcgactacaagatccccgacgacatcttcctcgcagccaagaaagcccccgagggctcaccgaaatcctactggagctaccaaatgtaccgggggcctcaaaatctaaggccaaaggtccattactgcaccacccagaccgtcgccgagcgcgtcatccagagatatttcctcaacgagccactgctaggattcgaccttgaatggatggcagacgctctgccatggcacggggcgagaaaaaacgtctcgcttatacaaatcgcgtcaccaacccggattgccctttttcatgtggccctctatcctaaaagtaaacccctcgccacgcctcttttgaagaagatattggaggatccaaaaatcaccaaggtcggcgtttgggtcatgggcgacgccagtaaagtgcaaaggtatctcaagatcaccccaaggggactgttcgaactgagccacttgtacaagctggtcaaatattgcgagagcggggagcacagcctcatcaacaagaagctggtcagtcttgggaagcaagccgaggaggtgttaaagctgccattatacaaagagcttgatgttcgaacaagcaactggttacagtcgctgcggctcgatcaaatcatatgtaagccccccccccctcccaccgcctccttttgctctacttttccaaaactaacacctcccggcagactcagcctcagacgcctacgccggcgtccaaatctactccatgctcaaccaccaacgcctccaactctcccccagccctcccctcccccaccccgccgaactcaaactccctattgaactccccgatcacaccgtcctccccccctcgacagaaacggacgaaatagaaatgacgcccgccgaagccgtatccgatccaaaactcaccaccaccaccaccaccaccaaaaagccacgggaatcctccaccttcaaaaaggaaaagcaccccctcgtccgcgaagccgacatgtggctagcacaatactttgtctcccacccccaaccggcaaacgccaccagcgccacggccgtcatgccctcccacctgagggcgtattacatctggcatcacaacccagagcagagcatacaagacatctgcgccctgctccgcgacccgccgctgcaggtggcgacggtggagaattacatcttcaaggctatcaagcgggctggtgtgcagtatgacaaggcgagggtgatcgagatgctggaagcgaaaaggcaggctgcggcaccgggggcgaagtttttcgagtccgagtttctaagcaagttgaagaaggaggaggaggcagcgatggaggagacggtgatggaggagacgaggagggaggatagtgttgttgtgtaaaatgggctatacaatacaacaaaaggttggcagagaaggaaaagcttgtttggaaaagaaagtgtaaaactgagaaaacaaagtctatgatatgaatggggaaacagaacgtttcgcctcggggggccctagaaaataggcataacatcactgtggagacaccattgacctcgattacgataataacaaatcacatcaaaccagatgcaaaaacaacccacaattcaaacttggtatacatttcaaataatcaatcacctactatgggtataacctccctcttactatctctctctctttccgcccccccccccccccatcacctccttgctccctccccctactccctaaccacatccctcccccgattaacctgcaccttcttatcctcccccccgctcaaaatccccaactccctatcccacacaaccccaaacaccttcgccccctccccagcaacactcttcttcttcccctgcctgctctccctctcaaaaacataaaccggctcgctcacattaccccccacccccccttcgctctcccccccactagcaggcctcacgctcctcaagtcccaaatcctgcacgtcccgtcgtggctcccgctcacaagcgagtattcgttttccggattggccgccaaagcgacaaccttgttcgtgtgccctctcagcgtcatcacgctcgtcgtagcagcagaggcgcgggggtcgacgagcgtgatgtgtcttgccgacgtgccgacagcaagcaatggtgcgccgttcggtcttggaatagcgcacaacgacagcagagagtgagaaagggtgaggttggcaacgacagagccagtggtcaaatcgagcgtcttgaccgtgtggtcttgcgagacggagtagcctactgtgtggtctcttgggtaaaagaaggcagctgtggggggggcgttgtggatttgcatgaggaagagagggccacgctggggggtggtgacagaagaggcaaccttcctccgcttggaagtgtgcgcgttagggaggagggaggcgtcggcctcaggggaggaggacttggaggcggaccagagagcgacggagccgtcggcggatgcggtgaggatgcgcttggaggggccgtggacttcgagggagtcgacgctggcgcggtggccgtagagctcgagggtgggcttgagttctgcttggcctgaggcgcccgggtcggtgtacttccacacgcggactgatctgtccatgccggtcgaggcgatctgagtggaggagatgaacttggcggctttgatgctggcggagtgaccgccgtggctggccgagggggcggtaacgaggacctcacccgaggcattccatattctgaggagaccgtcgtagctggccgagaggatcctttcttggccgcgggagaagttctcgcctgaccagcggccggcgggggaggtggcagtgagggcatcaacagatgaaacccaatcgtcatgctcgaacgaggcttcgaatacggggggtattaaggaacggacgtattggagtgtgaggttcgtttcgagggacaggccctcagagttgaggtagtcttcgaggctggaccggaggaagctgccgttgacgaggaagtcgaaggggatggagcctgaatcgagcatcaggtccgagttgagaatacgagagaggccatagcggcggatatcggcgggaacgaggagttgtctcttctcttctgggagctggagatcggcttcgttggtggtgaaggtcaccttgacctgggcgccgggcgcatcgttcattggctcgtccattgtggttatctgagggtgtggatggttgaagacggaatcaattggacctgctctagaggtattggagaatgtcgggtcaaaacagagggctaataatgaaagatgtcgagttatggtcctctggtgcaaaaatcaagctactgttgcagggatcgcattcaatctcaagattttttttttgtccctgcagctcgagttcagcgatttggaaccccacggcaggcttatcttatcgcaagccttatttagcggggcacctttttgggctagaactcaattaattacaggccatcaggacgcgtctaccgcgtctgcgcgtcttgctaaattgggctttgaatctccagtgcatgttctcggcgacccggaaacaccagacagtaacctgaaagtgcatcaggaacagcccatcatggtgaagctcgaagatattgccggtctcggtctgctacaggcaccaccaaagtaggagcaagtctctcatcaattccaatgaaaaacatcactaactggtgcgccctagaaccgactccaagaacaccgacctggagagagccccttccaactacaagtcactcaatacatttgcgctgcccaaagcccgacaataccaacaacagtttgccgatatatacttcctacgcctgaccaagatcaaacctgctgtggaacagatcgctcacgaagcatgggatgatacagtgctgggaggtgaaaatgcaaagaaggtcgagcgggttctcgatgtgcgccagggagagctgtgctgggtggcagggacggtctacatggacatgcccctgaagccaagtattctcgaggacgtgtccaaagacgcaagccgccctctgtctctgtgtgagattcatgttgacttcaggctaacatgatactcagcgctggatttcagccccgacctctgtcggccactactactcggaagatggcaaggaccaagtcatgctcgaagacgactccggtcgcatcagactcgttggcgaacccctcaagaactacttcctggtgactggctgcatcatcgccgtcatgggcacggagaatgccaacggtgaattcgaagtgattgatctcaagtttgccgaccttccaccacaaccaccacggtgggccctgtccgacaagaaacccaaatctgaagatgtctccatggttgatgttggttctccctccaaaaagatcgccatcatatcaggccttgagttctcgggattttctacagcctacagtgccgaattgaaagtcctgagagaattccttgctgcccaagccctcgacccagagacacaatccaacgaacaatccaagatctctcgcctgataatagcaggcaactccatcgccgaagccagttcctcagaccctcactccaacaaccccaacaccaagacacacgccaagaaatacggctacgacgcctccgcatacaatcccgccccgtcgcaactcctcgactccttcctcaacgagcttctccctagcttaccaataaccctgctccctggcgccaacgaccccgccaacgtctcttatcctcaacaaccaatccactctgccatgttccccgagtccaggtattatggcccaacacctacccatcctgatcagacagggtggctagacgcaacaaccaacccattcgaatcagaaattgaaggctggcgcgtgctgggcacttctggtcagaacctggatgacatctgcaagtacatggaggacccagatcgcctcggcctgatggaggccatgtgcaggtggaggtgttctgcccctaccgccccggatacactctggtcatatccattccaggatgacgagccattcgtcatgaaggagtgcccacacttgtactttgtgggttcgcagccaaagtttggcagcaaggtcattgaggggccggacgggcagatagtcaggttggttttggtgccaaagtttagtgagaccaaagaggtggtcttggttgataccgagacgttggacgtaagtttggtcagactttcggccgcatcgtgagacgagaggaagatattttatattagcgttgttagcatagccggaggatgagacttgggaatctaaatatggcaacctcaccagaatttgaggatgtcgattcatcttgttcctggggtctaatcacgtcccgttcgtcccaatctcgtgacaaacactcacgggaaataccaagttaaatcaaggcaattttcattgttattatcaattcttgccatccccatcaacgtcttgaggtcttgatatcctcaaatcatggttgcctagcaactgccatgccttgaccattcagggggcctgttgagcaactgataacccacgaagcaaccaaagtgatgcatgaagctccgtgaccgacgccctgttttcccgaaccggatgcctcgtttgataacatcaacaccccatgtcccatttttgatgcctgataatgtagaaccaatgcgtcaaaacaaaacctcaacgcgtagagatgataaggcgacgcctaaaaataataaacttatgcccgttagccccctttcagatccggaagcacttccacccgcccccgaccttgtcaatgctgatgaccaagctcttcagccttctggaaaggggaatgtcctcgatctcgacccagtcctcctcctcctccaccacctccaccaccccatcatcatcatcatcatcatcatcatcatagctgtcgtcatcactgtcgctctcttcatcgctgtccgtgttgtcatcatcgtcatcctcctcatcactgccctcctcttcatnnnnnnnnnnnnnnnnnnnnnnnnnnnnnnnnnnnnnnnnnnnnnnnnnnnnnnnnnnnnnnnnnnnnnnnnnnnnnnnnnnnnnnnnnnnnnnnnnnnnnnnnnnnnnnnnnnnnnnnnnnnnnnnnnnnnnnnnnnnnnnnnnnnnnngtagcaagtttcacgcattgcgttgggaccctcctcctccccgtcattcaaatgactgttcacattaacccccaccctcaaaaaatccacctccacccccctcaacgccctcataaccggcgcgttccgtccaaacaaacttaccacactcagatgcctcccttccccctccctttcatacaaaggactaagcctcaaaaccaactccctcaacctcacccccctcagtttctcgagcgcacgcctcaaaagattagcatactccccccccgtccggttccgctccatctcaatctccacctgtcttaccaagcccccgtaacgggaccagtcaatcctgtttctctgcccgtctcttcggcttcttgccgctccacctgtgcgggcagcgcttgggtcgcggaggagatagctgaaggtgttctccccgtagaggatttgtatgccctgggcaaagctttgtttgttgactaggaggattccgatttcgattgagaactcccgttcgggctcctcccccatcgccagtacggcgcgtcggggggtgggaagattgcgagtgcgggtgcggcgggggggggcgcggatgacttcttggaagaggtctttgacggggatgggtttgggggagacgaggaggtggcggtagattttggttaggatttctagggggagggtttggaggtgctttggtttttgcggttcggaactcggggagggagagggagagggagagggagagggttcaaccaccggagcagggggacgaggttggggacgaggctggggacgacggggtggggaatatcgctcccccagcagggcatgaatctcccacctcaaatcatcacccgtttcttcttttggcttgtttcggtcctgataccgggtggtggtagtgcgctgcgtttttggggcacgagggggaggggggggagaggggctggtgaggtcgatgatttcaaagcccctgttgacaccaacgccgggggggtgggcaacgatggtatcaccatcagcaccatcaacaaggtcgattcgccgtttgacagccatgccgcttctcctgacagaccgaatcgaccgactggaccgccgaccaccaccaccaccgccgccgccaccctcttcgtcatcgctaataacaataacgggcggcgacgacgaggacgacgaccactgctcattcctgacccccatctccacagtccgctgctgctcaaagatccatctggcaaactctatgctctggagattcggtgcagcagcggagtgaccaggggggttgtttctaaagctgctgctgctgctggagccaacattgctgccgcccgtgatcctagccccagccccggaggaggaggggggcatatttctcccgcccggagtgttgttggtgcctccctgcctgtgggaggcgataaatcgaaacgacatgtcggcttgtgcttgggggctgaacttgctgtgttattgctgtgtccttcggagtgggatcaatgtgtgttgatatgagaaccgccagatgtcatacgacaagctgtgtgacctctcttcttggtatcaatccgattgatatgatgctgatagcttcgtggtgaagaccactatggtgtttagtctgccgggagagatggcagtgggctggtgccaggcttgtcaaatagaccggaccacttctcgacgctgagctgcccagaaagatcagtaaaactgctaccaaacacttgcacacatcctacatacctcttcgttgatgataattataatctcttgttaagccgttgagtatgtcttgccgccaatatcaattgcccaggataacccgttgatgtctcgctagtagaaaagcctgctgtgaaaaaagacgggaaaaaatgaattgagtccagagagaaaaaatctctggtgaagtgatatgtgaagaagagcaagggagcgagtgaaaacctgtagattaaaatgcgggctatcagcttgctccgcgagacccgcgctggggtgagtttcgccgtgttgtgcagactggaatcctgactgatgtgaattcgtgtcgccgagccccttttaatcaggtcaaagacaatcttccaggggaaaaggggggtttttgcctgctgttttctggaaggcggctggtggtgtggagctgtgtacctaggtaagggggttattgtgtaaaaggggttgtttgatcggtgacacttgacgtgtgtattggaagacgatgatgataggaggtgctgttatgaatgctgacagtcaggaatggagtggtatgtcctgaccagagcacaagaaagcacctggagtgtgtattgatggttaaaagaaaagggaagagtggtgatgggaagagacccaggaccatagaacatggaagcaaatagaggtagtgtgagtgggaaggtgaaaaggtacggccgcagaccacccagaccaaggcaagaggccttcccttggtgatgggtgctgtggaagagttggtttgtgggtcaaggttgagatgaaaaggatggataggtcacagtcaacgaaagtaagaaaagaaaagttcgccaggtcagggtcaaagctagtagataaagataaagcatgtgcctgccatcttgaccttgaaaggtgttcctggatcaaggagccacatatgatagctgtgctgtgaaaaagcttggttggcaggcggaaaatagcttcgatggtgattgcttgtaaaagggggggggattgtggacaaaaaaggggtgatgaagggaagcttgggctgtatgaatgtcaaatgtaggccagggctggaccaggaatggagtaggagccaccacgtcctctgcagaatcgggttgagtttaggtgtgctggactctgggcgacgttgaatccagaaatccatcccaactttgtagctcaggaaaggagcctcaacttgcctcaaattgctcttgccagatatggctctggggaaggagcgagccaagtcagccagccactgatagcaaaggccatatcaaatcttgttttgaccacaaagaaacggagatatgatctgaagtgcggagttttcacgagccccgccagagctcacaggtcggccctcttcaccatgtgctcacaccaggcggcccgcttgagcgcctttgctccgggccagctcggcggcggcattctccatgacggccaccgtttttcgtgtttgatctctgcatacacagaacagaagaaggagatggatctctcaaagtcgatggattaggtatccaggcatttcggcagggctatctttatcgacatgtcgacatgttttgactctttttgtcacgaagcaaactacatgtgtccacttcccgactctcattcttcagcatccatcaacaccagtagcacacaggctcggagcttctctttaacacgggcaagcacaattctcgcagtctgtcactagaaaactgacacatgtctttccatccactcaggggctcaggggtaaacaccaccttactagcaaaccccgttgccagggcaaacctcccaactacccacaccataaccccccaaacccacctcgatatcgaccagaacaacagccctatcgatatcacctcttcaccctcaaccaccaacacgaacccaaacctccaaccccctcttggcatccgtatccaaaccctgtcccccaaactcccgccaagacctctacacagcatctttacgcgtcaccctcccacgcgtgaaccactcccccggcacctcaacaccaaactgctcaaaaatctcacgatgaacccacccatcatggcttttttgcgcgacatttgtacaagaagaagcctttccaggcaaccatatttcgactcctgccaagagatatagctttagatacgatggggaataaaaaggttgccatggagcaggggtcttgtgctttggggttggcacaaaagtgaaatgagcaggtgtatgcacgcgacttttgcatcttggttgttggacacataagataaggtaggagcggcttttccatcgacagcacattgttcccggtggtctggccatttctcaggcccgactctgtgcccaccgacaactaatcgcgatgctcctctcccgccgaatcatcaccctcacagccgtcctcggcttcatcgtcgttgtctcgttctttacagtcaaatacgacggccatgtcgccctggaatcagcggcaaggtcgctgacggggcaggaaaagaaacctgcgttttcaacgatacagaacgtggtctacaaccggacaagagtgcaagaggaggccaagtttgcctatgtgcagtacaccaccgatctggattacctctgcaatgccgtaagttttttctttttttcttttttttttctcttttttttctttcttttttttgttttttcccctgtcctcaggaacatagggaaagtgggtgtgctgactgaaaggaaaagatgatcaacttctcccgactaaaacaattcaacacaaaacaccagctcgcactgatctaccccgacacatggaactccgagggcaaatcagccgtctccgcgaggcgattccgcatcatgaacaagatcagaaccgaatacccgcacatcaacctgcacccctcccccgtgctgcagctcccaaacggtgatgccacctggggagcttccatcacaaagttccacgccttctccctggtcgactacactcgcgtattggcatttgattcagacacgctagtgctgaacaacatggaccactacttcgaggcgccgagggcggttcttgccgtgccgagggcgtattggttgggggatctgaggaatacttctctctccatcaacgagcagattctgggatcgcatgtcatgttgttggagccgaacaccaggcgccatgacaggatcgtcaaggacgccatggactcgggtgagtttgacatggaggtggtgaacaggctgtttaagggctcggcgatgatcctgccgcaccggggactggcgttgctgacgggggagttcagatcaaaggaccattcgaggtacctggttggggaaggggaggatggggaggatggggagcagtgggacgcggttgcggaggtcaaaagaagctttctggtccattttagcgactggccgttgccgaagccctggatgttccatactgatcggcagtggagggaggcgctgccgagctgtgaggaggcggaggaggaggaggagaggaggagaaaaagaaggggaaggggggaggacgactgccctgacaagctggtctggagggggttctatgaggagtatgaccgggagaggagggcaaagtgcgggttcattgatgagtgagggggatgcgaatgttgaacagctggatcgaacacctggacttggcgtgtgtcagcaaaactggtgtttggtcacggtgacattttggccaaccagacaccaaaattcgcaatcgtgtcgttgtcgaggctcattctgaggccacggtagtatctcatgcaagggcagtttgcagcttgttgacgtgacaagacaagaccaacggcatagggcgcggactgtacatgctgtgcaggaagagtacatgccgattgcaacatttctgttcccaaaccaacaaatccaacacctgcctcaacggccaccgatgacaggttggagattggagattggagacaggggaaggaagaaaagttggagaatgtggaccggaaaaaaaaggagtttggactcttggagaaacaaaccccggtaataagcggactggtccactcttcccgtgtttgagaccgcccgacaaaacaacggttgacgccagcggtcctaaaaattgatcacgccctgccgactaggggaccttcccgaaaaaggcggagggtctgtgagtatcctgtgtagcagccaacctgtcacgggatgtcaccccctctggaatccatcaggtaatagcgggaaaagctggaaaaagcttctagatcacaagatcacgcttctagcctgggtgaaacaagcggttggctaattgtgtcgttttcgcaatgccgaaacatgcacggaattgacgagaagaacggtgagatgtgtacagagtaatgtacagagcaccttgatggcgattgaaggctttgagaaacttataaaaggaccgatggcccgggagcggactcgggagaggaagggaacaaagatacatgatcacagccgactcgctgtcttgactcgggatatctgaagttctgaactggttgaaagcttacctccttatcacaccttcttatcatatcaatcttatcagttgcccgcctacttatacctacgttactcaatcaagatggatttcccacgccccctttccattcatgctcccttcccctatccgacaaacaccaccaagaccactcccatcgtcgccatggcctccattcccacacctgcgccctctcctcccccatccaccaaggggacaaccaccaccaccaccaccaccacagcccaagacaccctccagccatggatcgaaacccccctcatctactcggcccaaatgtcccgcaacgccgggtgcaacatctacctcaagctagagaacgtccaaccctctgggtcgttcaagtcccggtatgtttcccccttcccccttatcccccccttgccttgttcatatcgctaaccctcctccccagcggaatcggcaacatgatgctcgaagcctcccaatccacccccccgacaacaaaaacccacttcctctgctcctccggcggcaacgccggcctggcctgcgcaaccacctccctctccctccccaacagcaccgccaccatcgtcgtccccctctccacctcccccttcatggtccaaaagctcaaagacgccggcgcccaagtcgtacagaaaggtcagtcctggatcgaagccgacacttttctccgcgaggaacttctcgccaaggacacccccggtgtggagaatgtttacgtccccccgtttgatcaccctgccatctggcgcggggcttctaccctgattgatgaggtggttaggcaaatgccagaaggccaaaaaatggatgcggtggtttgtaatgttggagggggcgggttggcgaacggtgtctgcgagggcgttcacaagcatgggttggaggatggggtcaaggttgtggcgcttgagaccgagggggcggattcgttgtttcagagcacgctcaagggggagttggtcacgctggaggggattacgagtttggcgacgagcttgggcgctaggacggtcagtgaaaggacgtgggagtggtatcggcagatgaaggggggggtttgtctcgggggtcgtgacggataaggaggctgcggaggcgtgtgttaggtttttggatgagggacgggtgatggttgagttgagnnnnnnnnnnnnnnnnnnnnnnnnnnnnnnnnnnnnnnnnnnnnnnnnnnnnnnnnnnnnnnnnnnnnnnnnnnnnnnnnnnnnnnnnnnnnnnnnnnnnnnnnnnnnnnnnnnnnnnnnnnnnnnnnnnnnnnnnnnnnnnnnnnnnnnagttgtctattgggtggattctgaaaataaaggtaggaggttgacaccgccatcaattgcaagaaacatattttcaatcacgggtcgttggatgggacgcgacgagtctccaacgagtagcgcgacctacgccgctgtcacttattatacatgtagggcatttgtctaaatattattaacatttcttaattttaaggacggggaggcttgagaggggtggtgagagagagggtcatggggttggggagaaagtttatgctggcagctgactttgtttatactctttggcaactggcaattttttttggcgatattgaagcatggagttttcccagcttttgacagcctgtaacatttgagatggaacacccaaggacatcacacgcttgtatgctcagatgttgtctgaagacgtcaaagtgaaacccacacagcgctcatcagaaactcttttcttatgcaacaataactaccgtagcaatggtttgtgtgtcaaaagcttgttattttcaagagtttccttcgagcataaaaactccaacctcccatggtatcttttatcatacaaatatcatacatcctctctcgctcatgactgctcaccactagcctccggtttccaccactcgtcgacctctttccctctctgtgccttcctctgccgcttctttgcttcctttctctccttcttgacagtccttagcttctcctcggctgcttgtaggccttggtataacgcagggaatagactgtcttcccttcccttgccggggttggctattggcactccgtagctagtgtctgagaagagctcggtgtttttgaatgtcctgttttctggcaacaccccgagcatgtcgaggagttggtctgctttggtagggaggaagggctgtaggagaataccgcaaacccgcaggctctctgctgcgaggcagaccatttcgtcggcgagatcatgatcttcttggttggtgctcttttttaacctccagggttctatttccgagagaagggcgttggcctagggttatcatggttagaacgggctctcagaaagggaaaagaaatagacatacctgagttgcgacctccatgatggcccgcagagcagagacaggatccagattctccatgtgcttgtccacaatcgccgggagcgtcgccaagttgtcctccgggaactctatcctccccctcggcgatctcgaaataatctccttcagatcccaaagcttcgacctcgttatcctcgacaccaaattccccacccctccctgcaaatacttcttgtgcttcaccagcaagttatcattgttataatccgcatcattcccaatccccccctcgaacatgaggtaaaacctcaacacatccgccccgtgcacattcatgacatacatcggattgaccacattccccaaactcttactcatcttcgtcctgttcatcgtccagtgagcgtgcgtgagcaccttcttcggcatcggcaaatccaacgccaacaacaacgccggccaatacacacagtgaaacctaacaatatccttcccaatgacatgcacatccgccggccacccacccacctccctccttcccggctgccagttcgggaaccccgccgcagtgatgtaattaatcaaagcatccacccagacgtatatcgtctggctcgcatcccccggcaccctcaccccccagctcaacctactcgccggtctcgaaatcgacaaatccgtcaaatgattcctaacccaatccaccacatcccccatcctcttcgccggcaccacccactccggattctccccataaaaccccagcaacctctcccgtaaagccgtcatcctgaagtggtaattcctctcctccacccactcaaccttactcccgctctcgacactggccatgaaaacctcccccgtgaaagcatccatcttcttctcgatctgactttctggataaaacgcctcgtcactaacggaataccatccctcgtgtttactctcgtatatcaaccccttttcttgcagcaaaaaccagaaatgttccaccgcttggatgtggtcggtgtcggtggtgcggatgaagcggttgtacgatatctgggctgtagaggccagctctttgaactgttcggcggtttcgtcgcagaattgcttggggtgcatgtctttgttggaggccgcttgctggattttcatgccgtgttcgtctgttcctgtgaggaggatcgcgggacgggagtggaggacggattggtagcgtttgaggacgtcggcgagggtcatggagtacatgtggccgatgtggggggcggcgttgacgtagaagatgggggtggtgacatagtagggtttggtgggcaagtcggtggtagaggagagtcgggggagggaggtggtgaatcttcgaggagaggaggaggaggaggagaggcaggaggtacatgtccaggtctggcggcgggtggtgagtgaccattttgaagtcggtaggcgccggagggaggcagcttttaggaactccattggtgatgatttgaccaattggtccattcccctgcgtcgtgggatcggtcgggagggtgggagtcgggggcagctgtcctcgtcgtcgtcgaggtgagcttggggttgcgattggggaaatatttcgataagagctcgcgataagaggtaccgagacggaagtaagtggggagggggttagggttgaacatgaatggcgtaatttgctgagagcttcactttttgcgaccccgcgctaatgcggggttaagcacgaactttttgactgctcgagcagtccagctttcaagtccagaactgtctttcatggttcgtccttgagatcgtctcacttgatcagatccgcatatttcagatcttgctcctcggaattgacattttcctcatggtggctattcccacctccatcttgcatcaaataacaaggctggatggccgagcggtctaaggcgctagactcaagatcacagtatcttctcttctatagaagggtgcattctagtctcgaaagaggcgcgcgttcgaatcgcgctccagtcacttactttttccacttctctccactcggcctggataggctgagaaatggtggcatgcttttgtctttttacaggaggcccccgctggtgtccagtctgaagcactcgtttatgccttcatccaaaagaacagtgtgttgcgcaggttgtgcctcgaacaaaatgatccaacagttggctgcagtgttgctggattgtagcagtcaggggacattctgaaggctccgcctcatgcaaagagtccctcacagaccaagccatgcagcctcgtcaatatccaggcataacattcctggaaaagggtcagattttggacagcgttgcgttagctaagaaatggcacttggcgaatattgtactcgagaggcacctgaatggtctggcccttttggaggtcgtttcttctcccgccaacatggatctcgggtctggtcgagggcagtgtcatgcacgacgttccaacagcctccttttgataggtgctgggtaacaggttggttttgcgcaaacctatggggttttctgacattgagatcggagatatcgatatgataatttgtgatccatgcatgaccagagtataggtaggatgtatcgaatgaggttcttaacatgttgggggtgagtcgtgggcttcatattcatctatccttttgggtatctcgactttctgcgagcaatatgcgaggctatgtaagactgtctgaggtatccgttacatttcggcccggagtcgaccgaccgaccgacctgtcgtgggattccgatgtggccaggttgctatgccatcaacgaccgcgcaggtcaacatctgctggtatccatatggggaaagctcttggagaaaatataaagtccgtagagcctcacggaaagcctatactatcagccacctccgcacctgcacattatggtggtttggcgtggcttctgtcgctgccgatgttttctggaagtgtaagagaacgatatgtgattcccaaagaggcttagtgtcgtagggcttagctggtcgtcggaccttcgtgaaaatgacctgagttggtgaaggcgagacttggcgattaatgagctcaatatcttgctaggatctaggatagaccaaagtcccagaaagatgaagttcgagatggtgctggagccatggcttccctggagttgttctctatcaaggtgttgggggcggttgacgaaggaggcctggtttggagcgttgaaacgaccgtcatgttggatgtggctggaacatggcaaccagccgatccgtggtgattggtcctgtgagatgacggatgtgcagttgcatgcatcaggcaagcatctcgatgcataaccacggcaggaacacgatagacaaagtcgtggaagatcattcgctgaccacacatgagaggatcgtgaggcatcttctcatgagattcacccatcgttgtcgttgtcgtcggtcgggccagaacatgagcgcgagaagcgccaagtggggttaccattatgtcaagagatccctaggggtccgtgcaggggcactgaggggcagagcccagaagctgtgcggcggagggggtgatgtgatgaacgatgtcatctcgcagaacattcgaacgcccctttcaaccggctgtcagacagtctgatgttgtctttctctcgacggtgccgcagacacttgtttgtagcctcttgggcttgatgggctctgggaaagtccacatcatcaggcgcctgtaaggtaatgtaaacgcttgtaaagcggtctctgagaaccaataaatatcgtgattccggcctccgggtccccattgcgcaggccgcccctgcccaaatccatctcccttactggcggccacactgcaaccaaggaatactgcagctggactgcagcacctaccaaccaccaccagaggccccccacttggtctttgccgtagctgtttgtttctcttccgctatttcctccccgtcccgattctcgatagcttccactcttgtctacttgctcatagcttgcccaaacacacccaacctcactttgtccagcttgagtctgtcaagcgccccttgtacacgcacaaccaaacccaccactccatctaccccgccttacgatgcatctacactagggtcaagcccgaaccaccccgctggaccatagcaccgatacactctgaacaaaacgcaagcatgggcgataggaacatcgaaactctcctcaagaccgggtcatggaccatcccttcgcgctcaagaagcccgcatccgtatgtatatcatgagaccttggaagctcatgtctctaacgagagcagtgaccgtcgtccctatgaagacgatcagccgtcgaggtcacacaactattcatcgtctagagattacagcgataggccgaccagagagtacagcgatagaccagccaagccttaccacgatgaaccgcccaaaacatacaacgatggtccaactcgatcatacaacgatatccccgcgagataccgagagacaccgtcttactacagcgatgtacgaccgcaatcaaatatcagcgtccccaagagcaaacgagcaccccgcccacttgtcgaagaggagcatgagtcactagcgaaggagtcagcagagtctctggccggcgtagtgtctgatgaggaacccccataccgcggtgaagttgatcaacagcctctcttgctcccggttcacgagcacaaccccgagagacgatttgtgattattcctggagccggggaagatgggtccgcaaccgaggatgagcactatgagaccaacacttgtcggaaatatgtgatcgttccaccaaacgaagagggaaaggacaagaaggaaagcaaagatgacaagggcgacaggaaacctgccgaaacggccaagagacaggagctaccgagacgaaagagccaccaagatctgccccgtctggatactcacctcgacgagcgtgaccaggatccgaccgctcgagttcgccggtcaaacagtagacatgatagggagaaaccagttattgaccaggactcttgggaccgccccagcgcccgagacgaacgaagcgcgagacccgggccaccacgggacgatgagctcctgacgcctgccgtcaagtattccaacagtacaaggcgggaccgggaatatcgggcttatgacactggaaaaaacccagcatctgcccgaagtccctctaccagaggtgaccgggtcgatccgagaactacatctgacaaccgaggaccatcaactcgactagatcctggttatccccctagcgccggaggtcataagagagcatcctccactgtcagcggacccccccgtgatgaccgaactcgagacaggccgcggtcgatggtctaccctattggaaattttgaaggctttgatgacggcggtgctgatgacatcatgtcgttcatggcgcccggcatcaactttgatccatcacggaagaaacccgagacctcaccccaaagagggcctcaaagttctcaacatcgcaaccaccgtgccggggaaggcatgccaatccctcaagcttatgttgcacgccatggccgttccaacactcgcgagaggaatgactattctagtgatgatagccaccgtggacgtcggcaaccccggggagaacggccatatccaacacatccgtcgatggagccggagtatcctccagagatggtttcacctgagcaagccagagtaccgaagccaaggaccggctcgcccttgcctttccccactgatgattcaccagaccctagtccgcaacacgcaactttcccaagacacacccgaggcaggtcggattaccgctcaaactcaccctcgccgcccagacggagaggtacggggcatggccgagatgccagcatgagcacctcttcccagcccggatcgatggcaggctctcttggaaggaccaacgggttggacagcagaagaccgcaggccaagaacccagcaatcggcattctgcgacaagaatcgtctcttgatcccaaatcaccagtgatgtattggcaaaagggccgttttgatcctcttgatgagacttccagcccggccgcccaggtcatttccgttcgccggtatctggaggacgcaagcaaggggttacttcctcagttaccaacctgccacttccagaaccccacctcgccgtacaaagcatccgaagccgggcagtggatgacgctccaacgcgcagagaactttatcatctgtcccgactgctacaaagatgtctttgccaattctacataccaacatctgttcctccctgccccgccaccccagcagcctgtatcgtgcgactttggtagtcagttctggtaccgtatcgcctttatcctctcgttgaaacacaaccatacggaccttcgcctgttgcaagctgcctccctggtcgctgctcggcatcagccctgcgctggaggtgtacgagccacgagaatctggtacggcattctgtcgcccaactcgcgacatccgcgccccatcccggggttcgaagtctgctcttcgtgcgccaaaacctgcgaggccttgctgcccaacttggcgggggtgtttgtccccttggataacaatgagccgatgaagggcacatgtgaaatgcattactcccccgatagaaaacggttcatggatctgtgggaccatctggagggggtgagcgatcaggctgtaaagatgatgatggcgccggacttggtgctgttggcggacaaggtacgggatacggttcactatgaggagtgcaagaggaacacgccgttgagaaataagaaatggttcatgatggagagactgccggagatgacggtttgtggggagtgtttttgggaggtggtggtgccgttgctggagcagggcagacaggatggaggggatgtgaagggggagatcccgaggaacttttacaagcacatgcagagggtggaggggctggcgagttgtcagttgtatagtgagaggatgaggaatgtgtttaggctggcggcggagcgtgcggattggaggtttttggagaaggaggtgttggagaggatgagggcgattgtggagattgaaaagaggtacaaggtgttgatggagatgaagagggagggggcagatgaggagatggtggagggggaggtgcaggagttgattaggaagttgaaggttgtagagtagaggaatggtttcctttgtgaatattttgttcgaagacatagaggaggcaagataccagatatgtttacgtttgagagatagtttacagagttaggagaaagacagaagagagaccactcctaacgccgccaatgcttttcatcgatggtgaattgatggcggttgatgctgatttaggaagtttgatgatgatgaaagtgaggacggtgctgccggctgcctgccagccgagttgccagctgggctcaggtggacccccaccaccctttcggcctagcgcagattagggccagtgggttgtgcactggcgaccccacgggcacacgctctgcgaaatattgcaaaatttcaattggagctgcagcttggtcccgactttttcgaacttcaacaaccagcccaccgaccaggtaagcaaacgcccttcctcctgtccagcccgacgagaaattgcggaagctctcccaaaatcaacatccaactgattcggacccaaaaactaacagcctctttcgacacttgtcccagcaccggacaagatggcctccagaccgactgtcaccgttctcggcgccgatggcaaggccaccggcgccactgaggtcctccccaaggtcttcagcgcccctatccgcccggatatcgtcaagcacgtccacaccggcatggccaagaacaagagacagccctactccgtctccgagaaggctggtcaccagacctctgccgagtcttggggcactggtgagtcgcattctttatgggttgtgggaatcgggggagcacgagagagagagggggaaggaaatatggggttgggcggtcgatggagacgagaaaacgaggaacaccatgcgagacgaaaacgaggggggtgtgggtggggggagggggaatatcgtcaaaaagttgggtgtggaatgctgattgaggatgaaatctaggtcgcgctgtcgcccgtatcccccgtgtctccggcggtggtactcaccgtgccggtcaggccgccttcggtaacatgtgccgttccggtcgcatgttcgcccctaccaagatctggcgcaagtggcacgtcaaggtcaaccagggccagaagtatgtgatatcgaaattccgtggagatatgggacgttgggtttctaacaggttttgacaggcgtttcgctaccgcttccgctcttgctgcctctgccgtcgctcctctcctgatggcccgtggccaccaggtctctaccgttcccgaggttcccctcgtcatcgactccgccgctttcggtgttgcctccaagactgccgctgccgtcggtctcctcaaggctgtcggtgccggtcccgagctcgagaaggtcaaggcttccaagaagctccgtgccggtaagggtaagctcagaggccgccgccaccgccagcgccgtggtcctcttgtcgtctactctcccagcaccgacggcaaggagctcgtccagggcttccgcaacatccccggtgtcgagaccagccccgtcgatgccctcaacctcctccagctcgcccccggtggccacctcggtcgcttcgtcatctggacttccgccgccatcaaggagcttgatgccgtctacgagtccaagaagggcttcttcctcccctccaacgttgtcgccaacgccgaccttacccgtctcatcaactcttccgaaatccagtcagtcctccgcgcccccaagggtgaggccaagaccaagcgtggccacgtgctcaagaagaaccctctgcgcaacaagcaggttcagctccgccttaacccctatgccgccacctttgccaaggagaagctcggcgaggtcaaggaggagggcaagcctgttcgcgtcaaggctgacttcctcggtcagctcaaggagtaagctgctggtggagtggaaaagggaaaagagcgactggttgtgggtacttttatcggcgtaacggataatggcatctacgcgtcacatcaatgaattctgataccagattttggccaggtggctgttgtgattggtgacgtgtgaccatgcatgatgattttcagcgtagcaataagactttgtctgagcctcacgatatgcctgtccagagttttgattgttactttgtgttgtacgtctttggggattttgcaaatatccagttcatccgacagccgtcaaaatgccatcaaaaggagccaaatccagtcatgaacaattaccaggcagtactttgatatccgtttcgaggtaatatgtgcttgattatgtctgttccttgtctacgctagatatcgtataccgtgactgtatgtaccctgtctccatgtgtaaggtatgtttgtgtatcgctcgaagaatatatatacgtttcttgaacccccttcccgtttcccagcctttgttttttccatctcaaatccccacctccttccccatctgaaccaccatcacgtcaccctcctccaaatccgacgacgacgccgagggtgaaactggtgatatccgcacgtccttttcttttgcatcattatcatcctccccccggcagagtaggatctccctcaaccgctcccgcttctgctccccgaacccgatggcatccaggtacccgtccacgcccccgtaggttgcgtccagccaggagatcaccgacgataccatggcttggtctgtctcggcgaacgagtcggggaggccgacctcgcggacctcggcgaggcggatggagcggatgaggggggaggtcgagtttgtgaggtggtagtcgtgggttatggcttggactggggtgtggaggatgaggaggatgaggagggccaggaggccggtgcggtcttttccttgggtgcagtggattattttgggatggccggagaggcaggaggagaggcagagggagatggagggggaggagtgggagagggtgttgagggagagagaggggaggcctagcgggccgagggcgtgggttgagattagggagattgcgtgggggcgggagagggggtagaggaggaggaatttactgggttctcttgtcagttaccggggggggggcggtatagagaggttgaaatgataggatggatgaaacgtgaagatgaggctggttttgaggtcttgatggtgaaataggtcgaggtaatagaaagggtgtcttacaagatgttgaaccaggatagttgccagaggaggaagagctcgaagcggcgggaggggaggatgatgcgggtgtaggtgatgccggggattttgagggggaggttcttttggaggaatttgtgcttttcttgggcgatgaggtgctcggttctgtggggaggttagtatgagattagatgagagacatacaacagcattatgtggaaagcagtctgtctaggtatacatgacccaagacattggcaacgtgaccagtgtaacatgaacaaaaagtacattcagagttcatgatcagaagaaatgatagtaaataggggcagtactttgaccggagatcaatcaccgatttgatgccatagacctctgtgagacggatcctgtctttgtacgaagcatcgtccaattttgccgaacggaaaagaatgccttctttgagtactctatggaatcaatgttaatcacactgcatctacacgacttgtaagaatgtggacatctctacctcttccccagaaatgcattcaccgtcttgccgacatcacgaaagttgataatgccgtcaaactcattgtactcggtgtcctcgagctcggaccatgtatcaagcatggtgatatgcccagggcttggaggaggcaaagctttacacgcgattggctagttggggagtcgatgctgtgggcggtcatgtgaaggctgcttgatggcttggagcttgtggtggacaagtggtgagctgttttgctcgatcacgagtcaagggtttcgaggcggcgcacagacgacgtttcgtgatcgccaatggtgggtgagcccggcggagtggatagcaggggtgaatttcagcggggttttggcgtagggcggggttgaggatgtgagtgcatcacgacacacatcacgggttttttggaagacagaagagaggcagagagattttgaaagtgtacttgtcattgtggcatttgctacttcgtatttccttatttccggggagggaggtaggcaactttgggataggcgagaatgggtgtcaccggaaatgctatgtggtattatgtctcccagtactaccgcctgcaccagtggttgttcggttcttcagacatctcgaagtacatagaacaggctgatgtcgatagatgaaacagaggggacctacaggtatttcaacgatgtgtggctttctcaatgccaagccatccgtggcctgtgtagcagctgatggttgctgtggcggcgctgggcggggatcccaagccacctgaactcagctgcttttggcactcgcagcgggtcaactgcagggttgcactgcagctgtcgacggtgtgagagggcgagctgctgatgagggcgatgacgtcggccaggctagatgacgatgctttgtccagtaagccgccgaacggccaacagtctggagatgaacgccgtcttatctcttggaacacaaagccctcatagcctagaactgggtccagctccatttccttttgcccaacatcagaccaactctgctggcccttatgatcgcgctcatcagacaatccaatacaaacgctgagaccgacctatccgaccaggctgtctatcaatctattgcctacctattctcaccaccgagctggctaccccatctcaccgatcacctgcatcttttgttgtgcctggaatattgaattttgtctacagcacaactcactgcctacgtaaagtcgcaaatcatctccgccatctgcctgaactgggactttgggcttttcttgtgcaacttggtttttccattcacgaatctcaatcaattgcgcaaccttcatacctgaacattcacaacatacatagcgcaatggtgtcggcgtcactaaccacacacagggtcgcacctcgtcccatagctccgagtaagttccttgcggaggttccttcctctgacttgccccattgtttacgtcaacttacaactctgcagataatacgggccgcctgagatatgcaaacgccgaagaccttcccggctacccatctgctggattgaccgaggggagcgctgctgctgcgagtgctgccacactaggctgggcaaacagaaaaccgacagaagtctggaagcccaactccaacatcaccagtacatccgcctcaaccgccgcgctcttggctgccggcaacaagacatcaccagtcggccgtgagaaccagcccgttggcaccgccggatctcaagccgctgtggctgctagttcagcacaacggcaaccgaaagcaccatcatcaccgccatcgcagtgggtgtcgtcagcggcaaacctggcttttagtgctaacaaaccgccgccgccgccaaccatcaccgtatcaaatgcagctgggacgaccccggaaccagctactcttgggaggcagaactctctgcgcgccgccaagggggccatggcaggtttgagaccacgagcaaagtcgactcctcaacctgtggtgcaagagacatatcctgaccaagcgaactccgcttcgaatgccctgagcgctgccacaatagcacaccgaccaacgctatccgaaacgggaggagccgttccattcaccaccatggacaggaggatgtttacttcgaacccacccgtcaggcttgaagtggaggaaaagcagagagccgatgtgcttcatgcttcagcagtggccatggccaagagaatgtataaccaacagcaacgtcggacagaggagagcacaaaagcacatgcccgatcctcatcattcccccgacacgatccaaatcgcccgctagatgccgatgaagaaactcccgtcatgcataataacctgcaggaggcagcatatcgattggcgcaggaacgccttgctaaactgcaggaggagcatcagaagaatcgggacatgtcggactattatggaacaccaggagggccaagccgcaccaagttcggaacgatcagagggaggctcactaggaaacgctcctctagtgacggagatctccttgaggaccaacgacgttcccagcacatccggaagcaaatgtcgatgctgaatagcaagctgtccgaggtcgatgaagagaaacgagccaaggaccggcaagctttacttgccgctgctcaacgcaacgtacgggctcaacttcacgacatggacgagaaggtgctggcagaaaagggcggaatcaaggcgaagcccatgggtgattgggaacgcaaagccttgatagctgctcagacgaggttcgacgagaacaatacttcgtatcactctggaaagattgatatcggtggtggaaagtttatggaccagtctgaggtggacgcgattgccgccagaaaggttcaacctttgctggacgaaattaacgagagggctgaacgtgaacaggcgagattagaggaggagcgtctggaagaagagagacggcgggaagaggctgagagggaaaggctgagagagaaagaggtacaagatattcataagaaactcaaaggtatgttacttctctcttccagtgtcgtctcagctgctaacattttcaagaccaacagaaggaagacgaaaaggctcgcaaagctgagctcaaggaagaaaacaagagacgcaaggaggaaatcaaagccatcaaacaggagcataagctggcgacgatggagggtaaacagaaggagaaggaggtgattggccccccaccagcagttgacaccgaagagacagccgtcgagcccgtcgccgagccatcaccggagacagaggacaagcaacccaccaccgcgcaccggcacgccctctccatcagcttcccccgccggaaaaagatcaccaaagaaacaccctcctcacctgaaaaatcccccaaatcagaaggagaatcccacggcagagtccgcacctggcttctatcccggctcccccgtcctcgcgccaaatcctccagcgcagcagaaggccccaacgacccaagcacagccaaaaaaggggccttcataggcggaggagcccttgctcgcttggcacacaacaactccagctccccatccgtagccggctcccaaccccaggcagcgattaaccgcccttccacctcgggagcagactaccttggaactagctcctccctgcacgaagtcgcgatggcaggcagaccacaaccccacgacgagcccggggaggcaagtgggctgaaccctcctccacctgcgattgtccgtccggttacgccagcgaggacgatatcgcaagttagcgtgcctgtctcggatgtctcggagaggacggtgagcagtttgagtagtagtgatgacgggcatacggtggataagtttgtcgaggctaggagtcaactggggagtccgctgacgccgccgaggacgctgggtgggagcttgggggtccctgttgcggggagcaatgggaggtcgagtccgttggggaggagggagtcgaggttttcggagaatttgtcggagtaggagacgactgagacgatgacggggtggttgatggggtggttctggaggagggggtgaaatatgggtacaggtggcgtcttagtaatggtgttgtggctggaagtaagcaactttgtcactggtttggggaatagcgtcaagtttgtaatgttgggcaacggtgtcctagcaataacagaatgcgcggtcattctgtcttgtatttcacttttgtttcgtttatacgaccattcatataccctgtgctgtgcttccctcgaggccctttcccaaatgtcccaaacgccgaccaatgcgatatttccgtattcatcctgtctccttatttcatagccccaaaatccagcttcctcgccactttgctccccctatcctccccctccaaaaccccattcctcctcttcaaatccgcccccatcttttcttccccccccccgctcttcctcggcaaatcttcctttctcgtcggcttcggctccgtcctccaccacctgtgctccagcatctccctggccgtgatcctcttcttcggatccaacgccaacgtcttgaccaacaaatccaccccctccgaccccaccgccccgaaccgtcccatgtacgcctcttttccccacacaggcgtcacctcgctggggacggtatactggctcaactgcgtcacgcccggccagttatcttccgtcggcgtcccaatctgcttgcagatcagcgcgatctgttccacctctgtgttgcccgggagatacgcggttcgaatgatcagctcggcgaacaccatgcccacagaccatatatccaccgcgcccgagtagtgccttgcgccaaagaggagctcaggagggcggtaccagcgggtgatgaccgtggccgtcatcctccaccccggatcggagaaccccctcgccagaccgaaatcagcgagcttgacctccccatcagcggcgatgagtaaattgtttggtttgatatccctgtgcaagacgtaattctcgtggcagaaccagaccgccctcgtgagcatgcccatccaggcttttatatcccccgcgccgtaccggaccctgtcgacgtccttgatgagcatttccaggtccccgagggggaggtactcgagtactagattcaagttttggtctttggaggagaagacggagtagagctggatgatgtttgggtggccgcggagttcttggaggtgtttcagctctcgtacggcgtcgggggcgaggccgtcgttgtattgggcttggacttttatctttttgatggcgacgagggaggttgggtcggagcgggagtgccccaagtagacgttggcgtaggtgccttcgcctagtttgcggcctttgacgtatttgcgcttttcgagctcgttcatttgctcgattgggtcgagggtgagggagggagggggggtggtggaggaggaggggtcttgtcgggggagggggaggattggtttggctgctgagaggggagcaccgcttggggtgccattgctggaggtttgttgagaggaggggggttggcgtttgtgaggggagctgagagatggttggggggggtagactaggggggagacggccatggtcgcggtggcggtggtgaggtgaggttgtggtcagtatgtatcgtgggttgttggaaagtcaatctggaaagtcaatctggaaagtcaatctggagttcagccttgcagtagccgtccgtgtgtggggaaggtttgattccattagggcggtgaaagacgggtgacaaagcgttgacaggggtctgctgtatcttcgatccgccaagcccactataaatcggcagagcccccgcccgttggaagggtccacactgcagcgccgctggagtcactgcgtcacctcaccagcatggcccttcctgacgtcacgcaaaccggcaacgaaccatctggtcatgctcctgtcaactcatgtccctgttgcaccaccactttgatagccagttcggacttgcagcttcccgtgttcccgacagaagaggtttcgagagataggagaagaaaacacaggctggcagcacgtctctctcttgtctgacccttaactccgcccttttttgaacacgcaagcaagcaatgccgatgatgggaacacggcttataatacagctaagaagacgatgatacccccatagccgcgttgtgtctcctcgggttttttttgcttttctctctggtcccatattgaatcgccttgattcccacctcttgatttttcatcccagctttttttcccactcactattcagagtgtcaccctcgtttgttgttgaggcgaggtcgtcaacaccaaccagcacttggaggcaccacatatcaaacaaacaaacaacacacacacacacacacacacacacacacacacacacacacacacactaccactgtctcatagcactagaccgctcaccactcacaaccgcccaaaatgcgccacctcccctacctctcctactacctctaccccatcctcgcaggcctcatctggctagccaccctcctcgccctcctcatccactggctcgtcccccccgtctcccgagcgcactacccctccatggcagcctcccaacaaatagcctacatctccgacgtcggcgcctcaacactaaagcccctcttcatcaccggctgcgtcctcaccactgttttcctcgacatctccttcgcggcagattactacctccgccacaaaggccggttggtccccaaccaaacccggacggagacagtcctcgcctttctcaccatcgggttcgcaatcattggaactgtcgggttgattttactctcggtgttcgacacggcgaggtacccgaagctgcacaatatttttttgctgctgtttattggggggtatgtgctgtcggcgatttttatttgttgggagtatcaacggttaggtcaacgtacgccccctccccccctttctttgccccttcctttccccccactttcaggttactgaccttgtgtgatgtgatagactataaacaccaccaccaactctccacatccttctggatcaaactaacatttgtcattctggaaatcttgctagcgatcgcttttgtgtcatgcacattcacccagcactacaacgccggcgcggtgttggagtgggttattgcttttatcttttcggcgtacgtgtttagctttgtggttgatctctggcctgcgatcaagacgcagccaaacttgaatttgcacaacccaagagaaaaaggaatggtgtttgaggggaatggggggcaggtggtgaatgggaatgggtatgggaatggggatgggaatgggacgggggacatgaggtatgtcggggcgagcgagatggaggagggcgggggggagagtagcgggagtcatttgcccattcaggggtatgggaatgcagtgggcggtgggccggtgatggggttgacggatcacagtagcaggccggtgacgagggagagggggttggccggtaacttctaattttctgggttttagctatgcttggaagggagttttagttggggttatctggtctggtctgttttgggagaagggcgggggctggatatggtagatgtagatacgattctggttttttgtctggtcgtgtctgtcggtaaattgcatagccaagagcgcttcttcagaacaaacgtttggtgtggccggaagttatcccttcgttttattttcgaagtctgtgaacccatatattgccgtggagaaacgttcctcgtactcatcaatcataaacatcaacgctagtcttttaccgcttacttacgccctcccctcgccgttcctaataaccatcctcccctccaccgcctcagcagccaaaaaccccctcgtcaccggatcctccaccaactgtctatcagtcccctgctgctgccccctcttcaaatgcccaaacaaacagctccacaaatcctccccctccaccacctcccccgcaataaccccgtccctccccatcaacctccccagcttagcctgctgcatctccaatctatccgcctcttccaaatccaccaccgccaccactgtcccagccctctttcccttccctttgcccttcttgccattatcatcatcctgctgctgttgtccccccccacccccaatatgcgccaacctcttcctcacactcaaatcatatatcccctcctcgaccgtcccctccaccagatacaaccacaccgtcgtctcctgctcctgcccgatcctgtccacccttgctatcgcctgcagttcaagcgcagtgttgagcattggttcacagatgaaaacatggcttgcgttgactagattcaaccccgaagagtgtgctcgcgcggataataaaaagacttcaacggaagggtcggatttgaaggaggtggtgccgttgggtttgtcgaaggaggtgtaccctatgtgatacctcttgaaagcaagagcgaggacttcgaggaattccttgtattgggaaaagatgattgatttcgctccggggtccgaactccggagccagaggagatggcggaggagggtgtcgactttggttgtgtacgagggcccggaggaagggaggtcgatggatttgatttgggaaagcttttctgggttgaaggtgctgtagattgttgttgtgggttgggatggactggtgggggaggaggaggatgagggctgatcgtggggactggacgaaggagcaggggctgctgttgttgactcgggatggagtttgagttcctgaggtttgagactgatgtcgtggaggttgttggagttgagctgcctcttgcagacggggcactttctgtgggctttccaccagagagttatgcattctttgcagaattggtggccgcataccgtcaaaactccgatcgagaaggtagattggcagatgatgcacgtcttggactcttcggagcctgattcggtgtctttcaggtggatcactacgaacagtgttagctagagattcgacatatagtcatgatgaagggacttacagtatctgtgcttggcttcagcagctgcaagcctcccctgcaaaatctgcacttgcttgtccgccgtccgaagcgccgtctgaagaggtccctcctctctagagccctcataatcaccgaccatatcggaaacctcttgaagctgacgataaaaggccaaccgagcattgagcgtatccatgcacttttctgtctccttctccatggacgcaacagccttcgcctggtcattctggtgattagttgtcgacttgagcagtgcatcggcaatctcaagctcggcagcagcccttgcacttcctgaagccgtgtcttgtctcagcttcagagtcaaacctcgcagctctgataccacccctctcaatgaactgagtgcctgcccctcaacaaaaggaggcttgatagcctggctctgagcaagaagctggaggagcttttcgggaaaaggtccgtctccctcagccgccatccgagcagcaactttggtctcatgttccaccaaaaagttcttctgtccagttaccgcggctgaccggtcagcaagagcggtgcggaggacttgaagatagacaagaatctcgtcttggagcttggtcgattgctcgtactcttcaccagtgacctcgtcgttatcttcgtcgaccagcggtttgagaagaagctgaataacgtgctctcgccattcatctatctggtttgcttgttcgtccaaagccccgccgatgtctgtcaaggcatcgacgattctgctcgtctcgagtcccgattgactgggaggcttgaattcagggatctcggcaaaattttgctcggcagcccgatgagccaagtgctccattagcttggtagccttcttgtggctctgaaggttgtgttagtcagatcccaccttttccggaagaagcagaattgtgatgacacacctcgtgaagaatctcctttctgatctctttggcgcggtcatagctttccacctcgagcttctccagctctttgaactcatccgagtccttcacagtcgacgtctcatctgtcttgatcgtaaagtatgcatttccacagaagaacacagcagcatgctgtacctccaaagcagaacgcaacctgcgtcgagcctcaccgacctgagcagaccaaaactcctcacgctccccctcatcagtctcttcatcgtcatcactctctgatgtcgggttgcgaggctttcgtgctttgcgtgcctcctcctgggcttgtcgaaactgttgatgacattctgcaacccagccattggccttattcagcacctccttccacaaagccaacgcatctctcacccgcttctgacatgctaggatttgtccacgtgcgagctgccactgaagcaggttacgttggtcggtcctcatggctgcctcactctgttccagcatggcttccagaacctccatgaccgtccgcataggcgcagacttttggcccaacgctcgacgattccgactccccacctcgggatgcaaagctgtctgacgaagtcgatcgagagctacacgcatagcactctggacagcgggatcttcagggtcccaatcatcactcagcgggttgccttgcctatcaagaccgcaactagccgtcagttcctcgaaaagactctgataatgctgttcctcgacagcagtaaaaggcatcgtgatgacatagcgcttctgaggcgggatcttgatctcgctcttgaccatggattttgtgtggcgcatagatagaagtcgaaatagctctcggaatgactgcttgtctcgccttgagatgagattccataccttgccagggactgcaaagaggtcgtaacggaggaacagaagaagaccacggagatccttctggatatcgtccttcactggcgtaccagttactccccaagcattaatccttggaattcgacgagccagttgcgctgcgttggtactccggttttccaccatctgggcctcgtcgatgcacactcgccaccaagagacctgtacaagaggggacttgaccgattcatattgtttcacgttccgcatcgatcgcacaggctcgtcagaagctgcccatatttcagttcttagcacctcgtacgttgtgactacaacatcctgctgagcaaggtactctgctgagagttcttggccttctttggatgcttttctgattccaggatagaacagtacgttgagagatggtgcgtgacgttgcatctccgaaagccactgatcaagcagcgtagtaggcgtgacgatcagtgttgccgatgatgcaagtagctccctccctagaaagtggtcgtagaccatgacattggtttccgggcgaggatgcaaaagcatcaggctgatgacttccagcgtcttcccgagacccatttcttcagcgagaatcccgccgggggggccctccagagcctcaaataaaccggtatctgttgtgaccgcaccgatcagcgggctcaaatagatcgtgttgccatcaacatcatgagccttcgaccaagaaattggtaactcggtcgaatctgacggcggatttggcacgacaccgcccacgccgttgtgtgcatcttgagaccaccgtacaccctcccgctttagcaaccactggacggctctctgctggaatgggtacagttttgcctctaaccgtgggacctccatttttgagacctctgcatcgaagctttgcttgtctgggacacatgcagcctcgtaaaagtcttgaggcgaccatgaaagcgaggataatttatccttgggcagggccagctccgggtaccatgtcgaaaacacgatatttcgaagcgtctcctgtggcgatgtggcagcccttttgctgctccaaactgtaacttgttcattccatctgacctcaattgagacctcaagacggaggcctggaccgctctgctggatggacatggccacagcggtccacagacatccttcatcgccgggatcgacaccttgagtatgagccacctccaacgctggtctcaaggttggggatgtttcatcgccttgtagccggaacgagagatgaaagtttgagtttcgggattttgtccgaggtccaattatcagttgcaaatcggacgaagggacgaatatctgagccgattgggcagtgaagacctgcaaggcgatgatattgctgacatctcgggatgtgctcagtccattgtagtcgaaatctggtgcgtcggtaatgagaagcgacagagattcccgtgctactgttatcacaccatggcgtgatgtcttggcccgttttgcaggatgttctgagccctgctgatccttggggaccgacataggggcggaccgaagctgcgtcagaaacgctgtaacattttcgccttcgttggcagcatcttccgcgggggatgatttccttgaccttctcgcagccaagctttgcgcccttcggctggccttggggggcattcttccaagatgagtgacgagagataagttactgcccacccctacctacataaggagggggcagatttcaatgaaaaggttgctgccacctggtaaatttccatagaatatcagatctacggcaggttagtgacatgaggagtataaaacggtgtattgtcaagctcacgtgtagacaactgtttgtggccgactgggtagtctcgagaatatgtccaggtatgtgagcgacgttggttgcctatgcgagagcaaaaggtcaagggtgatataaaaccgattaccaagctgatgtcgccttctagctgggatggacatatagctggctggagcagctttcacgatgtgatggctgaaaggatcgaatcttggactggccaggtcgctgggatgaaaggttcatgcaggatctggaggagtgttgggtcaaacgaggagagccaggcaggtcgagggggggcggtagcttataagtgccatatcagtaccagtggttgaattgcagccttgcaagtggaagaccccaccataagttgagattggagctcggtgattggctcatgctttgacccctccaaacagtgccgcctgccaagatcagattgtggtctgtgcgctgggaccttgcatggcagttgaacggaaaaactttcgactccatggagcgcattcgaccgacgagaggaagcgattgactgccgccaaaggacccttgaggctatctcgaccgggcgagaccacatactagaaccgaatgttaggaggagttgttccataggttagttcccccgccgccacagcacctccctggtactatgaaccaactagtccagcctcctaattctctcaacagcgcacatgaattcgctacgactccattctgccttcgggctcctgcttcgacctgccgccgctgccccggttggtgtttcgaccgctgtccacggactcagagccttctctgcgacgacatcctcacaatccgccgaagccgccccatcacctgtcccaaaacccaagacatggatcccgaatcctacaccattcgtccccaatgtccagaccttcctcaccctgatcggccgcgatcttaaatcacacgcctccaaatttccctcatgggattcacttttcagcttaagttctgaacaactgagggagctcggtgtggaaccaccacgctcacggcggtatctcctaaggtggcgggacaagtttgcgaggggagagtacggcattggtggtgacttgaagtatgtcaagggcggcaaagctattttgaagctggtggagaaggtcaagagcccagagttgaggttacgatatgtggtcaacgtgcctgagggcaaggaggtggaagatctcccgctcagccaacaggtcagggcgaagggtttcaaagtcaggggtgtcgacaagatcacaggtccatatgttctaccactgaagggcggtagggcagctgtgctcaaggtgacggagggcatgtgggaagacaagagaggacacaaggtggatggcggtgagagaagacgggccgaggtccgcttcaagcggggtgttgccgagcggaaggcccggagagaggctcagggtctctattaagagtattgctctcttgatggcgcatctggatgggtggcctgagagacgatctcgtcacaattgtaaaacttgtacattaatagaattagacattctatacccaaccgccagcggcctgtctctgtaggatatctccaccgtcaactcggatcctgacggagcttgatatattggtctagcagctggtgactgatgatgggaacgagtacgagtatcgcaatctgggtaagggttgtgaatgcaacaggatatgggaacaggagtgcgatctgccattccagcattttggcaaaagggctttcgacagcaccttccgcattcgaaccacgggggacgcgaatgcttggtggtcggtgtccgactttccactgcattgtcagcctttactaatgggtcatggaggggccttgggaccccaattaactcaaacaggaagcacactgcaaccttaggtccaaaaacacgcccaattcaccagtcctccaggcttcagaatcaaaaaaagacgccgtgatgaggccgaacacgaaatgactggtagaacatccatgagggggatgagaatacttaaatcctagcggccgcaccagcagggctgagcagagcttttgcgacccgcgacttacgccaacaccaggcaacgagaaaatgcaccttacataagagaagggctcgacccgaccccaacggcaagcacacttacgcggccagtcttcgctttccgaccttgcttcgtcgtccaccatcgtcaccgtcgctaccttcttttgctcgccatggcagtcatttacactgacgtaacttgttgagtcgtggggggaaggatgaaccccgagggttgccagcagcaaacaggcagcagcagcagcactcagtccctcgaccgatctcgcaaccgctcgcgctcactctggatcagcaaagcaaatgaatgaaccgtcaattgggttcctcttacgagagggggggtgtagaagagagtttggtcgtccagaaggaactttgaccaactgggttggaaacctggttgccatcatttcgaacgccgcgggctaaacctcttccggatacatctgcacgccttctcgtcactgcaacacaaagtggtatcgagcttcagaatgggccaggagaaagagagcaggacggagtgatatttttggcgaggtcatagtcggatcatggaaagtgccacacacggcaacgaggcaacgatttgcccctacgatacgaccagacatgccagtacatcgacacgcaccgatcaggaaggacggaataaccggtcgaggagattgcattgtctcctctgggcttcgagaggaggaccaaacggagaccttgaatctgttcgaaccggccttggggcgaacgccaacaccacctgttctggccatggactttctttccccagtgtacctgcatatggaggtgttaggtctatccacggaacctcggtcatcgccaattctttcgccgcaggatgcccactttcaagacacctatgagatcagagctgttcggtgaccagaaaggtatggtatatcactcttgagggtgtctgctaagctacccagaccatgcggaagaaacttgcttcggggtacaatccatccgagtgagctattattcatctcgagttgatgaagtggttacatcacagcgaatactacagagacggcgagtttggtgctatcgctcgaggcttggggcaggaccatgcctgttgaggctgtggatgcaccggtacctgatctgaaaacaggcgttgttgttctcggagggtgtgggcaagcctgcgaagaagcgggatcgtgattcgaacggatcaacacacccctgaaggctactcaacggcggaccatcatttgtccagtacatcaccatccgggccgtcgactagcaggttgtacgcaaagcacagcccaggctcgactttgacgcggggacacggcggggatattcttctttcggagaaagttgactcttttgctgctaaacttgtatgtgcggctgaaaatcgagcatcgtcaaaagtctcggggttgagaagtctaagccccaaagagcagaaactccacgcggggagcaagagagcgggtgaatcggggaacggacggtcttgcttcgggtggcttgttgggcatctgcggaaaactgccgccgcaaccgttgaaagttgcattcaccctcctgcgccgccccaggtcttggcacttatcggctgtcgctacgccgcttcggctgcccgttctcctcggacgggagacgggaagtttgaagaagaccaagacacggagcaatggttcagctgttctggtctcttcagtcttggtgtgcttggaaggtaggcgggcatattcaagatcggtattgacggtataccgcatgtaagtgctggtagcaagcaacttctcatggcacgttacgtcgagcatccggcctgctatcaatatcattatctccaatatagcatccaatcagatcctcttcacaacgccgccattctcatcatcttgcttgcttgtgaacatggtgtaagtgcggggtgtcgtgcacaagacaagggagcccttggcgcgcagataaatttagataagttccagctgaatcggtttagtgttgctccgtttcaccttttttattcctttccccgaccgaacatgtcagttgagacagaaatcccatgtctctgacagatcacgggtaaagtgttattcgcttctgaatcatttccatgcgtggtgattgaggagcggtcaaaaaacatgcctccacgtgagcccaagcgaagaagagaagtcattcacacgagaccagcggaccaatggcgtgtcaaggaggtaggttgctaccaattgaaaacgcaccaattctcgtatcacctgggggagtggcagggtagcgcctgctgggagggatgggattgtgtcaaccccccgtgcagatattgtattgatattggatggaactggtacctacctgggagtcaatcattgggatgagtgggatcgaagactgccgcaacatagtactagcttcaagaagagaccaaaaatcgcatccaagttgaacactgcttgactaaaaaaaccgtagaaaccctctccaagtggccactgtaacgcaaaaacaaaaaaaaagatctaattcaggaaacatcacgacgtcggcggcgtctcggccacactgtcaccagttgtttgccaagttcgattggacgggaaagacttccagctgaaagagacaacctgagcggtccgcttcccggaagtcaaacattgtttctccatggtcgcggcaatgggtctcttgtgtgtctcgcgggagggacggtggctcattttttattttccttctcgggcccattcaaccggcctcggatgtatctagcatgaatttattctgaatttagaaaccatctgtcgatgattccatctctctcaataaaacagattggtcttcttttttttcttgcgagacccgagctatcctatcctatgctacccacccaccaactgcttggccacgatggcgatcatttggatgtcacggcggggtttctccggcaatccgtagatagatacgctgtcaatgattgaccattgtccccttgaaagttcgcttgttcgtggcagtgctgttcttgactgtttaagcttatatttctcccggagtaacttgtacacaccgaacgacgcaatagggttgcaagggaacaacaagacagaagaagaggctctatgatcatggtgacaaactgccaagttgccgaaactgaagcgaagctaagcaccacgatggtatatgttgatccacgtatagggttggaagttgactggatgctccgtattcccgcccgcaaaaaaagatttacacatagtttacaggggtgataactgccaagatatatctcttaacagagagatctgtctgcctgctgcacagtgcttttggttcaacggtgtcatggctcatcgttggtaaaaaagagcccccaaccacccgcagacaggagattcctcatgaaccccatcggtatggtatcgcatctatgcatcttctgtggcacaaaagcaagcggtggtggggggaaggggcaacggttcacccacgatcagatggaaaatatatgagccgcaaggggttggcagacctggggtggttcattctttgtgataccaccacgccttgcgcccaggtgatcccacagcctggttgcttcaattgcgttaataatttcgacgtcgtactcgacggcacaggcatatcttggtcccccagcagaaactcagctgccgaaacagtcagagtcacaatcgaagaatggttgatgagtgagagaccccacagtttattgaatccttcctagacgaggctgtgggaagaacacctcaccagatgtattgtagaatgcatcatcttgggtcaccgaatcgatcggtcggaaggttggcccgagatgcgatgggacttcatccgcaagatgccgtgccgttttggaagaatgcccatcctctaggaggggaaaaatgtctctgggcaaagagaaagacatgtagttgatgcttaatgcggttaatcctcgcgaaccagagagagagcgcgagagagctgactgtggtgtcgtttaaacaacgatgtcagggaccccactgcaggtcccgcagcgaaaaaccctcgaccagggttgcccttgcgttacccactaaactctatctgtactaagccccgccaaattgactacatttggggcctgtgattggctgaccgatacaattaccaaatctgcaacggtcctcccactttcaacaactcttccatccggcagaagagaaggagcacagcacacctcagctgcgagtgatccatcttgttcctgagaatctgcacgcgaccaaaagcaaaacccagacaggctcttcttccttctccgccgagagagtcatcatcttcttacgcatgctagccaggctgccatgagagaacctggatgcctcaccgggaggctgcccctgccgtgaacgagctttctccgggtttggtgaccgaatgcatgtgtgggggaaggaactgcctcccgctctctcgcccaacaaacccagcctcctcgggacgttctgaggggtctttactccacattatcagatgctggtcactgatcagcaacccaccgccgaccctcttgagtttgctcgcctttctcaatgcccgcttctgctttgccctgatctggcagcgagatccctcaatgccctactctttcattgttctctgccatgagggccaatgattggtctggaattccctaaatatacttcttctctgctttctatttgttcctttttccatcgtttcccatccttgtcttacttgacccccgtgccgaggtggaaacaccagatttcccattcagcgcatagaggattgcccggtgttcgggtcaatttatctatcgtatttctcgtttcttgttgctgggcagtgtcgtgtctgcggaatacgtcttcgctcagcttgactggttacctaatcagctgtctgagcgctccagggacagcacacattggaatgaggctgggttcgcctcgagcgggaccatctggtaggttgtcttggtgggtgggtgcagtgccgtcactctgccgatgggtcaggggggagctcagatacgtaccgccctctgctctaccttgaggcaaggtaccatgtcaaggtgaagacgggaggggaaggcgagtggggagcggaacacaaccaaagtcactttttcctcttgtcccatccactcaccgttgaccaggtaccgacgaccagacaccactctgtctgtctcgccggacacgccccccctccactccagcccactggctcaagcttcctctccccctcccagtagcctgtgtccacacgcatctcgactctctcaaacgacggctgctgcttgactggcacttgcagccaccctcacccttgcccatccactcgcctacccatccctgcctcccgttcgccatgagtcttggtcttgaatccacaacgggtgccagggggagtaggacgagagggtttgactctagacacacccagatcatcagcccgctccactactgaccttcaacccgctctcttggcctggtcaccggtgccggtttaagacagtttaaactcttcggattgcccgtcttatacggtcttcgcaagccctttgcgtgtcatccttcttgcacccctcgacttacacctacctccattcgctgtcctcgtactacggccgacgccgcaaataccgtcatcatcgtcttgctcgttccttcaacgtcgacgctaagccctagagaccctggcctactattccgagtttggtgaccgtttgtgatcaaggcctcaaggcactcacctcctcgacagccttacggggctcttcatcgtcatcatccttgacggaacttggtatataagagatcttgaatctcccgactggacgccacagaatcgcaacagaagatacaagctcgagcatcgttccagaagcatcatcttgtagatcctgagccaatatcttgagattctgagcgcagtcgtttgacctgtgagactcgttttttctcttcattattttctttcaagtctttagaatgttcccataccaatactctcatgatacagattactcgggcatcgacccagactacacgggaagctaccctgacgagtccttggtagactgggacggagctcaaggcagcaccgtctacacaccggcacccagcagcagttcgaacaagagccgcagcagcaaacggtccaagtcaagcaaactcacgaattactcgggctcagacaccgaaacagaagaagccaagatgtcttcacgatcatccaagtattcgggttccaccagctccaagaaggagaagtcttcgtcaccgagatcaaaggagtctgatgactggagtgccgtgactgacccggagatgagacgccggattcaaaataggattgctcagcgcaagttcagtacgtcttaccccgttttgttactctcttggcatatacttacatggtgatacaggggacaaggcccgtgagcaaaaggagcgcgaccaacgcgatgcccttaatgagcaatatgccgacagtagctaccgcatccgcagtgccgatgagttggtggacgaaggggatctggcatggggcagcttcagcatgggccacatgctctctcgagggcatgaagctgccagtgcggggcaacggactcacagtggcgggagcagaagggagtctgacctcgtgatggatcaggccatgtatagcagccacagcatgagcccttacccaccgacatcaatgggcatcccgacgacctcgggctataccatgggggggggtgccagctggggcggggacggggcaagcagcggagggggtgatgttgggtactatgattcgccttatggtgggtactatgatggcacggaacaccgttgagagagagacacatggagaggctataaaaagtggtgagtttgacagaggatgggaatgttgaagagaagctgacagggttcaaataggaaggtgaagtggggaagcaagacagtgtttgagcttggagaggaaatgatatgctcttcaacggtaaactttcccccagtcgatggagagactgcgagacactttcttctctttggtcagggctcatgcaaggaggtttcttttcagcttggttttctttctgtttttggtcacggcgatagaaacattttgacctttttggtggtcagtttcctgttttgtaagggttcttcattcctcttgatcattttgggatttgtttgcttctatatcggacaggttttgtttgatcttcacttcctgtttgttttttctctcggatggtttaacgtttaggtatacccccttcctgggaccttttggttggacggatgtttagattcaactcattggttattttttctccaaggtcacaggttggtttgggtatatggggatggatggatgggaatnnnnnnnnnnnnnnnnnnnnnnnnnnnnnnnnnnnnnnnnnnnnnnnnnnnnnnnnnnnnnnnnnnnnnnnnnnnnnnnnnnnnnnnnnnnnnnnnnnnnnnnnnnnnnnnnnnnnnnnnnnnnnnnnnnnnnnnnnnnnnnnnnnnnnngtttcttcaagtgtggctgaagatggttgttaataagtgagggggcacgagaagagagctacaaggtgatcctggtctgtcagggggagctaaccgaatgcgggtccgaggggtacctctctctgtggagcgctgtggagaggcagttctctcaccgcccggcaggtgccctgatgagcgatgccaagaaactctattctcgcacccccccatgcttttcgacaaaagacaaagtgcaacgtcttgcgttccatttgatgcagtccgcgaggccgacttatctcgcgtctgcggttcttttgagcagctgaaaccacacctctcccatcacatcccgtcccaatatatggaagacgcatggaagcttcggcgaacaccggtccctcggctccccagacatgagagacgcacccagtgttccctcgacgtctctatgcggcaagatcatcgatttctcaccctcacctctctcaccttacgttgattaccttcccgctgctgcttcaccagcacgaccagtgaccacctcgcttcttcttttttctggatattctgtcatgattgacatgtcacagcgtcgatcatctgctcaccatcatacacatacatctcgacgggaactcccctagtgggcgttggttcctgcatgttttttttacgccatcggcttattctttctgcgagtgctttccgctcagcgaagccggtaaggtgcggcacagcggtgttgagcgtttatttcctattttgccgtcgtgcttctagcgtagtagctctgagggcgggccaagttggccaggggaacatcgttcggtcctgtcttgagaaacaagaacctataggatgaggatcatatggccacccgcgtgccgcttatttctccccgtctcttgaattacaactccggacccgtcggccactggctttttttctcatgaccaggaacggcgtggagaggtaccatcggcaagccatggcatgcggtattgcggggggcttccgcgccgaggaagggagtgtgggtggggagggagctcaagcacctcacgccacaacaggccgacccatgggtccccgctacgttgttgatggaggttgggacagaagcaggccactggggatcattccgtgatctcgtggtgcaagcgattggcaccgtatgcaggtgtgtcgacctcggtcgagagaatcaagacaggtgcagcacacgatccttctgtaacccacgcctgctgcaggctttcgtgttgggaaggtttggcgtcccatgtctttgatcttcggcagttgttgcggtggttgagaaaagctgaaaaggggacgacaagaggcgacgccaagggagcgggcttgctgggtgccggagaaccaagtcctagcgtgatcgatctctcgagagcttgacccgccgctatgccagacttgtcagttccgtctttggagcgccgttgaagtggcgtccgaggtgcgtctatgccgtggtttctcgagatgatctgtgctcatcagatccggaagaccaagcatcgcttccacggagtgtcgatgaagctcgtgagaccccgaggccgcatcggtgaccgaggttatggaagtacacggccgctttgacggtgcatctcggagagatggaagctatctcgaatgtgaggtagggccgagggagcatcgatatggtaatctgctcgtgccttgggggtgtgggggtcggtccgagaactcctgcctcaacaggactgacagctcatcgagagctgcttgatgctgaactagggacttggtttgtgccatcttcgtcccatcacatctactacatctccgggctctctgcggagggcctcatcatgtttcgattcaagacggggggtcactggatcatggaattagcgccgagtggcacgtctgtgggggcaacaccagcgatggcggtgttcaaatggggttaagtggccttttctaatatctttactcccttttttctactcggcacgtcgatgtttttcaacctagatctgggaggggcctgtacctatccacttgcagatcttgtttcgatgcctttattgacttggcacatgacgtcctatcttaaattttccttccgccccaatcagggccggcattcgaggcactcggacggtggacgatggagatatggactgaactttcgaggtggaaataacacggacgccgggaactctggcgggtgacgtctgaggcggcgataaggacaagaggaacggctcttcacgtgaagtcgtctggagatgtttgtggcttaatgtttgcagatgtccaccccttgtcgagatacttgcggtgcaagtatatccattagtgccattctgggccctctgcaggtaaattgaaaccggtggcttgcagatctcacgcagatggcgtcaaccatgtcaacaccgttattgaaactttgcaaaagattcagtacgtaaaccatgagcgtacacacacacacagacacacacacacaaatcatcagatgaagtcaaaattgcctagcggctctgtggatgcagatgctatgatggctcgcttgatacggatataacctaccaattcggaaggtgtcactgtctctccagatctacttgtatgtacagtaggtactgagcgagagttggagagaagaacaggtgggagcacagttgctttgaagaccccccccagaagcgaaaaaaggtggggttttgttggggatcttcggcggggggcgcgggccgatggataactgcggggcccgcccaattgggagtggggcagccaacagctgagagccactgccagggccaacctacataggccaggggccaagactttgggcgggagagagctccaacttgcaagctgtccgaattgggtttggtgatagcagacaggtgcctgaccaccacgaacaatcgcgatactgacgaagacgacgacggcgatgatgatgatgatgatgatgatgatgatggtataatcacacatatattctcgaaccgatcaattgacccacaatgatccccaactggaggcgcctcctggcagccaccgccctcctcacttctaccaccaccgtcaccgccaccatcgatgctgcgaccccctccaacaacgatgaatccatcctccacagcgaactcgcctcacagcagaactcatcactgctatggggcccctaccgcccaaatctttactttggggtgcgccctaggattcctaaatcgttgatgacgggcctgatgtgggggaaggtggagagtttccatgactttcagaacacgatgcggtacacctgtgagcagaacgaggggatgaaggggtacgggtgggatgagtacgatgcgaggaacgggggggtgcagacgattcacgatagggggaatgggctgacgctcacgacgagctttgtgaaggttccggggggggaggaatggggggagttggggggcgagggtgaagggggtttttggggaatccggagcagaggacgacggtgattttgtatgtaacgcaggagggcggtgggannnnnnnnnnnnnnnnnnnnnnnnnnnnnnnnnnnnnnnnnnnnnnnnnnnnnnnnnnnnnnnnnnnnnnnnnnnnnnnnnnnnnnnnnnnnnnnnnnnnnnnnnnnnnnnnnnnnnnnnnnnnnnnnnnnnnnnnnnnnnnnnnnnnnntatccggacgagcagatttggcaggcgacgcatatgtgtttagacagttgaaggagcaggtggattggttggtggagaacaagtatgataatgccgagcatgcgccgccggtctggcaggttttcacgctgcagaataggccggggaaggggaatgtgcacattgtgcaaaaggtcttcgagggggactttgagtttgatgtgctcttctctagcgagagtgcgggtatggagctcaagagtgaggatctgacgagggagatcaaggctggctcggaggagtttggggagaggtttgggggtgtgtttgcgctgaaggcaccgtttaatgcggacaagtacaagaagtttggccggagcatgttttcgaacttgattggtgggattgggtatttctatgggcaggcagtggtggaccggtcttatgcgccagagtatgatgaagttgatgagggcttctgggaggaggctgccgaggctagggcgagacatgcggaagctttggaggggccgcatgagcttttcaccagtgttccttcacgtccattcttccctcgcgggttcttgtgggatgagggttttcacctgctgcctattgcggattgggacactgatcttgctctggaggtcatcaaaagctggtttaacctcattgatgaagacggttggatcgggcgcgagcagatcttgggcgccgaggcacgcagcaaggtccctcaggagttccagactcaatacccacactatgccaacccgcctactctcttcctcgttgttgagcagtttgtcgaaagactgctgaacaccaacggcaccgcggctgtccacaaggaacgcctgtctcaaagtgagtctttggccaacgcttcgctcgagaaccccgaggttggcctcgactatctacgcaagatctacccgctgctccgccgccagttccaatggttcagaaagacacaaaagggcgatatcaagtcttacgacagagaagcatactccaccaaggaagcttacagatggcgcggccgcaccactactcactgcttgaccagcggtctggatgactacccgcgccctcaacctccgcatcctggggagctgcacgttgacttgatgtcctgggttggtctcatggccaagtcactctccaacattggcgatgctctcggctttgcggaggatgtcagtgagtacaggaccattttggacgctattgagcacaaccttgtcgacctgcactggtccgagacggatgggtgcttctgcgatgccacgatcgacgactttgaggagaacaagctcgtctgccacaagggctacatctctctcttcccattcttgaccggcttgatgaagcctgacgaccccaaggttggcaggattctggccttgattggcgatgaggaggagctctggacgccctatggattgcgcagtctcagcaagaaggatgctctctatgagacggccgagaactactggcggagtcccatctggatcaacatcaactacatggctgtgaagcagcttcacgtaagtcttttggtcttgaaactgttcaggtatgacaagctaactcgggtttcatagtacgttgcgacacaagatgggccgcacaaggaggtcgccagagacttgtactcgcgcctgcgcaagaacctggttgagacgatttacaatgcctgggaggagactgggtttgcctgggagcagtacaaccccgacactggaaagggtcagagaacacagcatttcactggctggaccagcctggtggtcaagattatgaccatggaggacttggagggtggtgccaaggccacggggagtgagcacggtcatgatgagctgtagtgggcgagtctatgtatgtgttgggtttatgtagttatgtacagtaccagcgaggagttgggggcgaaagagcgaaatacatacggttttggtcggtggatttttatcattgctagtggtggtttaggggacttatatatccagcccgacagctgtcaccagttgccccacctgccaccgaagtaatacgcggccccgttccgtaacccgtcatcccgacggccgctttagcggtcagcctccccgcagcgggctggggcttgtgtctcatcccctgaaatcggaatcgtaatatgcggcctcgcccaaccataataactgaagcttacatcaagctcgacgtcgccagaacgcccaacactgtaatcaaccagtcttcagcgccttttgcttggttttattttcaagctccacgatgtcatgacctgatgctttttttatgatcccttttcttttcttaactttgtaatcccatcagacgattcattggcagtgatccaaaagaccttggcaatgtcgaacatcacccccctccgacgagcgcccaccacgggcggggttggaacgggaaaaatgactgccgcgacgacgacgacggcggggcaaaaataccatcagcactcgacgagtatattgaagacgctgcaggcgaccgagatgttggacacgaagcctgttttgccggctggtacgcaccacccctctttctaaccccccccctccccggccctcaggaacataaactgatggatatgtgcttgtagaaatcatcgccaccatcctcgactacctccccgtcccggacctcctccgcttcgcccgaacgtcccgccggtacaaggagatggtctacgacgacacacgctgggtggcgcggttaaagagcatgggtgtctgggacgaggcgggagcgagaaaaagattcgaggaggcggtgcagaggagacgacaacaaactattagcagtggggttgggagggggcagccgataccacccccatcaccaaccggaacaacaaaaagagagagtttattctttgatgcggatttagaacaggagaggagacagcacgagttgctgcagatacagctgcagaaacagcagatttctgatttgagggatgggtttgagacgatgaaagtttctggaggagggtcagggggggagccgccgagggatgtggaggggttgttgctggtggtgaagaacgcgaggagtataaggggtcatgcgaggcaggagtatgggaggatatacggggcgttggcgccgttttatttcgatttggtcagggcgaggacgcatacggatccgttggttttcaaggtttttagggatccggatcggcaggcgaggatgctggctaatttgaggagttttgcgaggagtgactgggcggatggggcggaggggaggagggagaagttggaggggatgacggggatttttgagagcgcggtgctgagggagtttgagcaggggtatgagttttgggatgtggatgggaggatgaaaaagtatgcgcatgtattggaggtgttgaatccggggagtagtgcgggggtagagctgtttatacagaagcatccgatttttgcggatagggaggtgctggcgaatgcgatggattgtgtgaatcaggccatggcggatagtatcacgctggagccgtcgaggaggttttttgaggtgttggggaggaaggtgaatgagcagggtgagatcattgggaggatattcccgaggccgcagagggtgttttgggggtttgtggataaggtcagggaggagattatggtcgagtatatcacgcctttgtttgatgatgcgcatcagaggagtataccgagttatttgagagcggtgtcggggatttttgagcagacgatgttgttcttgaggacgctgacgccgccgaagggaggggaggtggatcaggaggcgaaggcgaaggagatagcgttgaggatctttgagccgcatattgatttgtattttcaggacgaaatcgatacgtttacggcgcaggcggagagggaggtgggggagtgggagaagaagttgtcggagcaggaggcgagtgccgagtcgttttatatgggcagctttgcgaaccggcaggcggacaagaaggacttcttgacgtcgttcaagaaggtggttatgatgcctgttacggtattgcctacgagtctggggttgcccatagggtcgccgtttgcaagtagtaaacctgctgcgacggcggctgctaatggtggaccgtcgactccgagtcgggcagggtctcctgcgccagcgggcactcctggcgatcgcgccagcagtccattaccaggcaaagcatttgcggatgaattggcagccaaggcggcgctgatgacgtctcggctggagggcatcaaatccctcttcagcatcgaggtagcgctcagcctggttcacggagctaaagccagcctaggtcgtgtcgctgtcttcatccagcttggaggccaagtcggcggcgaggcgcgagagatgtgcgaaaccatcttcgtcacgctcctccgcatcctcggcaacggccacgtcaagcctggtttcgataaggccgtcacccatctatcccaatacaacccccgcgaggtcagcgaacacgaaaagggaggcgtggcccccttggtcacatttatcgagctggtcaacgtgggcgacctcatctcccagatgatcgacgtcttttacgagcaacagctcgcccagccgaaaattgccgacagaaacgactttttggatcctgcgggcatggcaaagaaaaagtttgagcaaatgctcgacgagagcgtcgccgccggccttaataagggcatcgacgtgctcatggacgaggtggaatacatttgcgccactactcagtcgccgacggactataacccggggggtatctctgctcctgattccattctgtcagggacgatccctgggatggagaaggcgcctgctccgaagccaccggcgggggcgatagatatggacattggcccttcaaaaacagcgcagaggatcaaggatctggtagcgtcgcacacctcgatgttggtgggcagcacagacaagtcgatgcttgatgtgttcaacggcgaggttggactccggctctttacggcggtgtgcaagcatctgaagagacagcggatcagcaccgagggggcgatcaagctgattgcggatatgaatctctactttgagtacatccgcacgctcaagaacaaggacttgctcgcgtatttcaaggcgttgagggagctgagccagatttatctgattgatgcgaagcatgccaaggagatggcgacgattattgctgatggggacaggtttggggggatctttagggcggaggaggtgtatgagtatgcggagaggagggcggattggtatcaggtgaagagggaggtagagagggccatgtatgggttggagtgttgtgttatgtagacaacttgggacatagacatgagaggaagagatataagggcaaggaagggatgacgagaaatacaaaaaacggttttgatggttgagcaaaagctcgtttcgagatggtcctgccattgctatctatcgacctagttgtttgttccaatgacccgactgccgtagaggtgatacatagtgtggagaaaaaaagggaaaaccaaacgctgatatgtcggccgtatttggtgtttcatatataataatgggtatccaactgagatggaaaaagagaaacactgaaatccctttcagtctgtatatataaagaaacccgcccccccccgcccaaaaaaaagaaacaagaaaacacgccccctaataataaatttcattcccgtgcaccatcgccttgaactcatcatccggctcctcaaacctgtacccttcccccctcaccaccctgtccacctcctccctcacaaacgggtacacatccctccacgcgttcctccccatccacccatccagatgcccataccccggcacaaccttgcgcttgtaatccccgtcctcaaactggctgcacaacacctcgtacgtccgctcggtagcctcgggcgacaagacagcgttgtccctccccacccagagcatgatcggtatcccttttagtcgttggacattctccctcgtgtccaggggttcatacattggcgcattggtcatgacatgaccctcgtagcccatcttcatgagcaaattcagcaaccgcatgttcacccccccgaaaaaccggtcgatctgccggtgtgtagcctcgttgaggttgtggtggttccagcaccgaccaaacaccaacgaagttcggtggcaggcggcattgttgcacatttctttgcgggattgggggtataacctcagggcttggttaaggagatactgagcccatccctcgtctttgctcgtcgagcagctgaaccaagagccgcagacggcgttgtataacttgtcaagaggcaaaggaccgccagccatgactttggccatgttggcgggtccccagatggggttcatgaatacctgtgagcagtttatccccaagatccaggagggggggattgtcccgtctaggaggccggaggagaaggctaccgagcccatgcagtgggcgacgcagtagactttttccggggaggcgagtttgggggtgagggtggtggtctgggatttgcggatgtattccaggcaggcgcggaggtcgaggcgggcgtcaaacgttgtccagttgttgcctgcgatcatgagctggccgatgcggtggacggacacccagacgcggtagcctgctcgacggaagtagttgactgcgttgaaggggatggtggggagggcaaagatttggtggtcgacgctcgcaccggggatcatgaagaggtcttttacctggtggccttctgggacgtgggtgggctcccatttgtgcatgcgggttgttacgccgtccgaggcgacgatggcgtaggagctgtcggggttggtgtcgtttgtgaagccggtaaacgtttgggttgggtattggaggggggtgagaggggcgaggaagagggacatggagcggcgggtgaagtaagtcaggaaactggcggcgctgacggctttgcggatgaagctgctgccggtggtggtcatggtgttgatctgggagaggaagtcgctaggttggatttgcatgatgccctttgcgatgggggcgcctctgcgccaggcgtcctcgtcgtcgagatcgcggcacatgcctgggacgtgctcgctgatggtcacgtagagggtgctggttgccttccagaactggataggggccagggcaaccgacgagtcaaccaccttgtagccgtggaagtgcagcctcctgccatcgacaccagtcatgtcaaagtcgtaggtcaggttgcgagtccccggagctttggagttgagaatgaacagattaaactctcctctctgcaccatgaacggggacccacgaatggccgggcagacaaaagtgccggtcagcatcccacgatgctgcacatggctgatcatctccttggtgttgaaagactgcacgctgaggaagaacctcgcgctctcacagagcgacttaccaatgcgatgagcaagctcatacgtcgcccggttatcctcggtcatcttggtatcagcatgaagaaagccagacatgacctcggtaaagccaatgccgctagccttgacaatccgagccttgtccatgaccttctttgccgtctgaatgctgatcagctcttcctcagccttcaactgctcccgcctctgcttgggcctgcaccgcttgggagcatgcgccggctccccgagcaagttgagaatgccattcttctcctcgctaatcttgagctccttggactcgcagtacgcctccaccgatcgttctgccaaagcggcgatagtggcaaaagggttggcacccagcgcagtcggaatcacagaggcatctgtaaccacaaacccgtcatggacttccgctccgtttccgctaaagagctgaccgacgtggttggtaacaccagtcctccccgtattgtctcgagccatgcaggcaccactaaatttgggtcagaaaaaagaagaaaacttccgtcggtgcaacgtggtacattcggaggaaaagacgaaaaagaaacttacccaatgggatgaaccgtgatctgctggcccatgatcccgtaaaaggggctgtgtaccaaggtacctccaacatactctgtcgcccgctccaagatgttgttgagcttcttgacgtggtggctgcgagcgacgccgaggaattctagaacgggcttgtcgtccttcagcgacagcatggcctgattgctgtcatgcgacatgaccagatacacctgcgtccgttccgtagcgccattcttgaagtagggtcccaaaagtctagaaccccatctcgccagagcagcctgcgtcttctcgatgatagtatcatccctcgggtccttctttcccggcatgaagtccaacatgacctggaaaagatgcgacagagcatggggaatagccccctcctcgatcacatacccatccaacgggttctcgtgtccctcccggttatcaatcacactcgtaatcgttggcccgatggggttatacggcgacgggaccggcttgcccatcccgttgacgtgtctgtcggtgttgtatccaaacgccaacatgtcgccgttcccgctcatgttctgtccgacactgtcactcatggaaaggcccatagccttgctcctgagtaggatctcggtcgaagcgatggcgccggcaccgaggaagacggcctttttcgcatggacccacataaggtcgttgtgaagatagcctttgaagagcccgcggttcctgccgtgccaggcgaagaagacgcggtagccttctttctcgtccttttggatataccgcacctcgcactcgcagaacatttcggcgccccagttccaggcgtcggctaggtaggtgacgagggtggtggttttggagccgtcgttgacccccgtggcgtcctggcctgtgaggctggatggggacatctcaacgccgcagctgttgggaccattgcgaaagcgtgttgtctgcttgaccttcttgaacttgtgacccatgcccaggttttcggcttgttccttgaagactttggtcttggggagttcgggccactcgctggggtactcggtaggttcaaggacctgttccaccttcttgtagtctaagccatcactgtcagcacacacgtttccatcgtatcctagatgcaatgggggttctcacacttatccaagccctttgggttttccctaatctccttaggccagggcttcatagacagcgtctgcttatccgcctccataaacacattcgcattgatcagactagtgccaccgagacctgttcaacgtcagcacaaaagaaacccctaacccggacttcagatcaagactcaccgttacaaacaaccgcattctgtcccttcccaaaaatcatatgatacatgccggtagggttcccgccctccaccagcttcccctttaaaaacgccggcgccagctgccccgagtagtgcagctccttgaacgcctccaccgcgccggtaggatactcccccggccacttctccctccccctctcaagcacacagaccgactgccccgtcctcgccatgcgggaggcggcaacaccaccgccatacccagatccgatcacaaccacgtcgtacgatcccctcagcagctcaagcggcttggagatgcgaggaaaagccttgtcgtctctcccgtcggtgtaccccctgatcttggcccgggaggtgctgtgaggggaggggtcttgctggtggccctcgtaggtttcgatggggtgggagtcctggcgggagggggttgtggctctgggaggaggggcggtttcctcgctgatgagggtttgggtgctaaagacagaggctgctcgggggttggggctggaggaggagctggacatggctgcttcggttgaggaagaggattccgagtcggcggttcggactcttctgtgtcgcaggttgggctctgtctctgtccggttccttacgctgtcatgcgtcaaatcggctggactgtggacgatgtgaagatggtcgatggagagctggcctctggtgtcggtggtgccagggctatcaatgtgaagggctggggtgagaggaggtgtgtagggcccgttcggtccgttgggatgggctcccaacatctccgaagggttttgtctctcggatttgtccattgtggtcggtgagctggcctgcccggataccaatacggtcgtgtccactatcagggaagttggctgggaaggaaaagccaatccgtgtcacacaaaggaacaatagttcaagtaagagagtatgttggctgtatgagatgggaacacaagaaaagggggtaggtaggtaggtaggtaggtaggcaggtagggtgagagaagcaggaaaaagcctcgaggatttgaagcaggctgtgagatcttgataaaggttcccagtttctgggcgactcgtccgagggggctatcggcatgatagaggcgcgatcccagactggtgtggctttgtctgggccaaacatcttcgataccgtcggtagaagggcgctagatgtgtattgagcatacaatgtcacgccatccctaccagtttgcagactgtatgcagtctccatgtgggggaataccaaattacaagcctcggcccctaccctttgctgaccccaagaatattcggtcagggcgcagctcgtcagcccgagttcatttgttggactactcctgggctgggctgggctgagtaaaatcttcaaccattgctgacaggaggctgtcattggctggcatccttccaccctaccaggcgatggagggtggacaaggggtccagggtagggtggtccaccgcgacgggtgaaccagacatgggagacacctgggagccatctccgaaagaggcatgtcagtcttggagtcgcgaatggtgaccatctttcaaatgctgccttgtggctgaggaacaaggctcgcaacggcgacgatgtcatgtggaaagacgtcttttttggagcgcctcccccccttctttccgttcccctcctccacaagctggaatctatgacggacgcaaaaggatgtcgattggctgtatgcaaactcagcccataagatagatggtgtctcagacagatcgacgaatcccgactgcacgggcaatctatccgcaatcatttaggggctctgactggcagcttgtagcagagatcaccgtagccatccctcattgctgccttcgggacggcagcggaggtagggcccttttcgtggtggccagggttgatagtgctgatgctgcgttcattggaccggaaacgagcgggtcgtgataggctacagcaaaaagaagtcggcgatgttgcaagccgtcgtagccgatttactcgggagcgcaactcgcagcttttccatttcatcatgttgcagtttctactcggatctcgagcaatcgttatttgtatcagtacctttcatctcaatgccctccttcaatgctttgcgaagagttagcgctctgatcacgaccagatgtttgataactcaatccttccgataaaggcaggggcgctgtcaaaccaagactttacccctggcctccttaaaggtcgggggggccggcccgctgtgctcggcagtcgatggtttgcgtgttggagatcgagatgtcgcaatgcgagcgaggcccaacagtctggcccttgggctcaccggacactgtttggaaatactgtataaactgcagagcccgtccgtatgggcaacgggcgaccgacgtcaaaaacgacgtcaacgagctgacggcctcaggcccccaatcacaccccatgcagtttgatgcctgattgacacccacacacacggtcaaggcaaagccacaaggctgataactgatcggtccatcaatgactcttatcatgactggatcttcattctgaggatatcaggagggcgtcgtcgtcgcattgcccgtataatcaggtgtagtagatagactgctgttcctgattcgcaaaactcgagtgactcgacatatttcgggaatctcagcctttgagctgggcgagacgacgattggattccggtgagaaggtaactgtttcgaggccgttgcacagcctttcggtgccaccaccttgtcctgggtatattgacatctgtcagccgattggccaattcgcccaaattagttcgggcggttctgtctccatctcgaccacacgacaacgacgtggaaaactgcccaatagcgttgcgagggtgcggcgtcaagggggtgggtgggcggtcggcgacaagtgtggctctttgtgtcgctgtggctttcagttcggtgttttgggttcaacgtattcctcgcttgctttgcttgcgatgtcctggaagagtgttgcacaacgtcaagtccacgacaggtgttattcatggaaatttgtcacgaaaacgccgattgtcccgacgtaaccttctttggagaaagacagctggagatatcgcttgatatcgctccgggccttatcgctgatatccagcaatcagaccttctctgattggcttttacgctctctaccccatggggaagtttgattctgggaaggagccacgacttgtcccttccgaggtcccgggtcaatttgtgctggtcagctgcccatttgataacacttgataacacggaaagggcatggtgtctcattaatggcgtgctttgcttctcaattcacttcattccgaacatcgacttcacttgcagtttctgttctttttattttttatattttttataatttttattgtgtttatattctttttatgcttggggcatccccaactctattctacagattccttccctgcgccatgcacgacacgctatccctcccaaatgccgtctatgccccttggtgtgagaaccttaaaaaccataacaagaacacgaacaggtacacacacacacaccatcatccacgcccaactccaacaagcttacaagcttattctgcctcccgcaggagcagaacagcaatgacgttgtcggtaaggcccgctcggttcaattctctccccgactgtgcaggaggcacaggcgtggttgttactcaccgagctgccaatgggaagatgggggtggaagatgaagatgaagaagatgaaagtcgtaacctcgtcccggccatcccgtccgatcccttcaaactccatacccagcacccaagaacccccatgacgccaatgggtccagaaaacgcccaatgagaaaaatcacaatcccacaccgatgggcgtgccgcaaagagcggcggcgtcatcatcgaggtggcggccagatcgccatcctgatgggaatggctcggcacttggtcacccacatacggatgtgtggtggtgcctctgcaaccctggttctagcccgggtagcgtcggatgcctatccagcaacacatacagctactctgccttgggctgaactgcaaccactggatcatcgctttaagcggcaaagccagaatcggaggtgacctcggcatcggcagcctccttgttgagctggttgtcccaccagtcaccggtctccttcatggcacgggcgaccttgacgaaaccggcaatgttggaaccggcaaccaagctgggatactcgccctcggtggcctcgacgtactccttggccgtgttgagaccctggaagaaggcgcacttcatgatctccttgagcttgctgtcaacctcctccttggtccaggcgagacgctggctgttctgggacatctcgagaccggagacggcgacaccaccgcagttggcggccttgccaggggcataccagatggcctcgcccttcttctcacggcgctcgttctcaaagacctcgatggcctcgagagtgcagcccatgttggaaccctcagcaatgaacttgcagccggcggcgacaagagcctcggcctcctccttgctgacctcgttctgggtggccgaagggagagcaatgtcgaccttgccgacgtggacccagggacggacaccgtcaatgtacttgaggttgtccttgtggctgtagtcggagagagagccgcggttgagcttgagctcagcaatggcggcgatatcctcgggggtgacgccctgctcgccagtggcgatgagagagcccttggagtcggaaagagagacgaccttgccgccgagctcgatgaccttgagggcagcatactgggcgacgttgccggagcccgagatggagacgcgcttgttcttccagccatcggtcacaccagcatactcgagcatgtggccgacatagtagacgaggccgaaaccagtggcctcgggacggatgagagagccaccccagtggagacccttgccggtaaggacaccagtgaacttgttgcgctcacggcggtaggcaccgaacatgtaaccgatctcgcggccaccaacaccgatatcaccagcgggaacatcggtatcggcaccaatgtatctggcgagctcgcgcatgaaggaaacgcagaagcggcgaatctcgttgtcactcttgcccttggggtcgaagtcggaaccacccttgccaccacccatcatcactgttgcgagttggttagcgagtgctcgccatacaggaggcaaagttgcctgtcacttacagccagtgagggcattcttgaagatctgctcgaagccgaggaacttgaggatggaaaggttgacggaggggtgaagtctgagaccacccttgtatgggccgagggccgagttgaactggacacgataaccacggttcacctggaggtcgccattgtcgtcctcccagatgacgcggaactggatgacacgctcggggatggagatgaccttgagggcggtgcggtactcggggttcttcttgaagagggtgctgttctcgagggtgtagtagagctctgtcgggttcacgagtcagcacgagccattggcggaccagtgccccaaggcttggctctcatggaaactcacccttgtaggcctgctcgaactcgggctcagaaggaaggttggacattgtgacgagtgttgaatgggtatctaggggtatatgttcttgttgttgttgttgttgttgttggaatgcggaaatgtgtcgagggtatcaactgttgaactcgtacgctgtcgaacgaagaatgaatgggaagagaagaggacaatcgagcacaatgggacgaagggaaaggacgagtataatatagacacccgcacgaaaggccggtggtgggggggagggggggggcaacgtttgaaagcccgaatagcgatggtctctttttttcatgggacgacagaaccaagccttttcctggtcccctgttcctagctacacagttctctctaccgacaggagcacaatagtgtagctccgtttcacactattatccagagccttgcgtttttctcctgggatggtcgtcaacaggcagcgcgggggagtccctgtgctgggtcgagtggccacgttttggcgaggatttactcagggagcgccggttatcgctcgtgcgttagaagcacggcgcacagttccagcgtcttgacatgtggaacgacgtccgcgccagtcgggtcgtatttgctttttgccatacatatcatgatgcctatttcccctttggaaaaccagacgatatcggccgtgggatgagatattttcctgcaataggcaatgccccgcgttggtctacacatactgtcgtcacatagcattgctgattggctgcccggcagcttggaaagggctaggcggtgctgctcgctgcccatctcggggcgtggtggtgcgtggaggttgcagtcgaatgggggggcagtttgggggtccatatgggggggctcgggggggccactggagggtacgggtggttgaacaatgaggaaaagctcgcgtgcttgtcctggaccctggcatgacatctggcagggggccccggcctcgctgacgacaggctaggatcaaaagatgccgccgcggcgccactgggacaggccctcattcttatccgacgacactgattggccgcccttttctgggtcaaagccggtgggatggtgctcacgaagggctgcggggtcgacgggagctagcattctgcgaggacatcggcgcaggacagggaagcggcgccaaaaacgacgcagaatcacccggctcattttcgtgcgactccgacgtcgctggagtcctagtggccgtcctacgctactcatgtccctcatgtccgcttccctccggcgcatcccgcgtttagtcattgaaaaggcagacgagctcctcgacacgacgacggcagggttgagggttgcggtttggctgatcagcctccggtcttgcagcaggtaatatttgctgctatctgtgcagttgtaatgtgaactggtaaccaattcccaactgaccactgataggcatttatttgaagctggcttctcccggccatcttggacgtcgagcccttgttacctaaccaacactgccaaaccccattcagctgtcaaagtcacaaatatcgctcaaacataaacggaagaccaacatggaaggacatgtttcgagatcgggcagagcaagctgttgttggtgattaatgtgtctagtagtcgagctgaacataaggcaggcaggacaccaccattcggcacctccgtcgtcatgatgtcttgcagcctgcatttccttgcatttcactttctgtctcctttcgatgacgcactcgggcgtgatatccctcaagctgcgccatggctcttggtctcgaccagtgggtaaccaagactttcccaagatctgttttgtatccacacgggaaaatccgacaaatcgtaacctctttaaattcaaccagggacatcccttcctcatggggaaccctaccccaatggggtcaaggatatcccgactttgacgatgagttgggaaaaaacggccgacggaaaatacgatctaggtgttgggttttttgtctgtttgttcctcaccaccagggaaaaaaactaccgaacgacctcctcatcttgaatatgacggagcgtccgtagatcggagtaggtttggggtttatccttggtatactctagctggtgagaaacaaatatggggggagaattgttctttggaactttcgtcatcttttctagcaaccagggtgtggaccaacccagcagcacctatgcttttctcgaactgctgggcagaagtcaaatgatgatgcctgacgacgagctttggggtgttgtgttgatttgttctgtttcttcgccccgagccccgagatcccccggccggcgtaagtgcgaacggcgcttgggtagtgtagtgggcggagtttcggagccaggcccgatgatgaagaaggtacggggactagaactagatgactggggaccgggggagagagggatctcggaaggaaacggcttgacgcggctcttttcgatgtatttctagatttaatgtatgtgtgggcatgacacgcgcgcgggacggtgatcagataagaaaacaccagggtcttgtttgaggatgagagccagtgaggggaggttgcattacatgaatgcatgctgtgtggttttgatggtgtcggaaggaccggagcggcgggactgagcgagcagcaagaatgtcaacgggtacctggtggttgtgtgtaacggaggaggacgacgacaacgacctcggccgagagggacatcaacatgggacgtggggtttaggtatgttgaaggggaacactcagctcggcgagccctttctcgtcggcgaattcctcgctgttgcgagcgcctccgtcccgtcttgtctcgtctcgtctcaggttgtctagagaccagaccagaccaggtcgagaatattcgtcgtctcatctttccaaaccctcttcttcttcctcttcctcgtcctccttctcctcttcttcacttccaccgttttgttcatgccagtcctgctatctccgacaatttaagcttcacaatgacaccgtcaatctgcagtcgcacaaacaagcctcctgcaacccatctaggccagatctgtccatgacaagaggacatacattccccaaaagagaagacggtccctgcgtataaggtaggtaggcagtctagcacgtgggtacgtaccttggataggtacgtatctacgtacctctttgctgccgctgctgccgtgatcccctactaccactaaaaataacatgtgaaagagcaaaagccaagaatgagtctatttcggctttgggggaaacggcggcgcgtgtgcaagatcatttgataagataatctgtacctgttggggtgatgtgactagtagggggatgtcaggctcggtgcgcttggctgagggagatgagattgataagataatcagggtgatggtgaagttgggtgagtgtcggcatgtctgtcggaggaaactgatctgataagattatttagggggtggtgtggcctgttggtgtactttgggctggtgagaggactgatgttcttttgttggggtggtgatataagaggggggttgtctgttgcgggtgagttgaaatgttggcggtgtttcttcaagttttttgtgatatcgggggtgataaaggtggatagagtgagatttgcttatggtgacgtgggacctctcatcgtgtgcttttgtcttgttttcggtttacttatataagtcaggcaggtatatgcggcatgagtatattcaggctgagctatcctgtgtaagccttgattacatgtatcctgtcatcaaaggttgtcgtggggttttgttggttggttcttttagcaggctctagtttacatgctctcattcatgtgctctcattcatgtgccctcactcatatgctctcattttcgtgttagaacttatcgtctctcatcccttcagtctcattcggcatcccatctaatacctttttgatagaatttatctcagtgggtacaggactccaggcacttacagggcagcgcttgcagacctacttttccacaaaatctctcacacgactattctcacgattttccttccacagttgctcttacactactattcttatggttactgtgtatctgttgctcttacataactgcacttaaaccactgctcttacaccattgctcccacgccacctttcatcatctttgcacagtttctctcgtctctttctgattcaaaacgcactgctggcctagagttgcatgaatcttcagaccgtaaaacctcacaaatgtcttgcatggcaagtcccctacagcttacttagatacccaagggaccctggtaaccaagctagatatagctttcttggtttcctcaaatttcacatgcttcagggtgtttgcaaactactagtttgaaacccttgatcaagtctggactaaacatacaaccctcccttccccgtgacaaggagaagaatgtggttcttgtctagcctttgacgggattggttgtctcctattcaggaacgagacaggtgaaaggaagctgagaaccacacgctcacaagtacgtacctgtcctacgtctacgagcaacagacacagacgcatttcatccgattcagggatgcaggggcagcgtgacacaccacctcgtcaaatcataagacgacaaccttggacagtgtatgatccccaacactcgaatgccagtaacctacctttcaggtcaagctctccattattttcacatcatatcaccaccaggccgtgggccgaattcatatcgccatgcacgtgagccgacagtgcaccttccatcccagcagtctttgactctacattgcaaactagctttttaattttccctacctactacatcttccagcagctccttacattccttaggctatatcccagcatgtgtcttatctcattcatcacccaacttccattttgcccagtctcacttggttatccatcatctcatatacaactgaccaaaaccaatttgcagcttcgaaaaagacaacaacatagacaaaaccaaaggcgggtatctccttctcttttccagtcttcactcccaacagacagctcaaacagttgaataaccaaaagcacacagcataccatcatccatcacaacttcaaggacagaacggacgagaagatatacaaacagaccaacatcagaaggcaaaactcaaaacgcgcaaacaaaaaagaggacaaaacgtcccagtaaaaatagtttataatttcaaaagataaaaggggtgagagtgaaagaggaagtatgtagcagtcgtaacatggtaatgtcggtggtatacggcggagagagtttaggtaataggtagaagagaaatgaaagaatcgaaagtcgtgctttgttttgttttttgttttcttttaaacaaaaggcgtctcggtctaagctcttccgcttttccatcccccctttcccccccaattgactcccaacccctattcccccttttatcaacaaccatcagaagcccaggagggaaaagagaaaaagaaaaagaaaagtctcgactcgtcaacccgcagccagctcagctaaccagccgcttatgacacctgcataaccataggcccggcaacggtaatctcatcggtaatcacacccgtcaaaggacccgcgctggtcaagctgacataggtgacaccggccaagttctggggcacctcgcacccggcctcctgcgtgaaggtagtgaagacggtaccgccggggttgccaccagtagtgaagccgcagtgcgtagccccggcagcagcctcgctctccaaccggatgacagtaccagcagtaacagtcgccgcgtcaatccccgcgcccaaggccaaggatgggaacgcagtcaagatcaagttcgacccctcagggcagctctcgataaaaggcgcagcgagcgaaaagacctgcttcggcgtgagaggggtgtcgaacgcctgggggacggcaaccaccccgctggcggcgcggacaaaggtctggtggcgggcctcgatggtgaggatggagccggcggtggtgaggatggagccgtcggagatgagggcggcggcgccgaggtaggcggatacacccacgttctcgaggacggcggcggtggcgaccatgccggcggcgtcggtgaagccgaagttgtatgtgcacggctggacgggctggacgccggcctgggcgagggcggattggagaagcacgacgtgctcctcttcggtcttgccgatcttggtcaggtcctcgatttggcgctcgttaaggccgagggcttggaagtcggtgacagggaagcgggcgaagccttgctggtagaaggctgcttcgagccattcgagggtgagggcgctggagggtaggttagtgtcaaagttggctacatgggactggtttgattgaggtcaactcacaattgaagaatgtcaagatcgttgataccaagagcctgagcagcagcgttttgacgcttcgcgtgttggtacatcttcagctgggccttgttgagcttgggaattgatgggagggccgaagcaacagccgcaagtcccgcaacaaccaccccaagtgtctttgtgaatgaaggcattatgtcggttgtgtgtgtgtgtgtgtgcgagagagagagattccgtttctttccaaatgtcctttcggttatcgttccaaagctgtcgagttcgagcaaagaccagtccgactgcttgtataaaagaagaataagacaagacctgcctgaggtaggttgtgtataaaaagattaaaaaatattaaagctgtaaaagctgaatagatccaatagtacgcaggagtagcgacgtcgtaannnnnnnnnnnnnnnnnnnnnnnnnnnnnnnnnnnnnnnnnnnnnnnnnnnnnnnnnnnnnnnnnnnnnnnnnnnnnnnnnnnnnnnnnnnnnnnnnnnnnnnnnnnnnnnnnnnnnnnnnnnnnnnnnnnnnnnnnnnnnnnnnnnnnnnnnnnnnnnnnnnnnnnnnnnnnnnnnnnnnnnnnnnnnnnnnnnnnnnnnnnnnnnnnnnnnnnnnnnnnnnnnnnnnnnnnnnnnnnnnnnnnnnnnnnnnnnnnnnnnnnnnnnnnnnnnnnnnnnnnnnnnnnnnnnnnnnnnnnnnnnnnnnnnnnnnnnnnnnnnnnnnnnnnnnnnnnnnnnnnnnnnnnnnnnnnnnnnnnnnnnnnnnnnnnnnnnnnnnnnnnnnnnnnnnnnnnnnnnnnnnnnnnnnnnnnnnnnnnnnnnnnnnnnnnnnnnnnnnnnnnnnnnnnnnnnnnnnnnnnnnnnnnnnnnnnnnnnnnnnnnnnnnnnnnnnnnnnnnnnnnnnnnnnnnnnnnnnnnnnnnnnnnnnnnnnnnnnnnnnnnnnnnnnnnnnnnnnnnnnnnnnnnnnnnnnnnnnnnnnnnnnnnnnnnnnnnnnnnnnnnnnnnnnnnnnnnnnnnnnnnnnnnnnnnnnnnnnnnnnnnnnnnnnnnnnnnnnnnnnnnnnnnnnnnnnnnnnnnnnnnnnnnnnnnnnnnnnnnnnnnnnnnnnnnnnnnnnnnnnnnnnnnnnnnnnnnnnnnnnnnnnnnnnnnnnnnnnnnnnnnnnnnnnnnnnnnnnnnnnnnnnnnnnnnnnnnnnnnnnnnnnnnnnnnnnnnnnnnnnnnnnnnnnnnnnnnnnnnnnnnnnnnnnnnnnnnnnnnnnnnnnnnnnnnnnnnnnnnnnnnnnnnnnnnnnnnnnnnnnnnnnnnnnnnnnnnnnnnnnnnnnnnnnnnnnnnnnnnnnnnnnnnnnnnnnnnnnnnnnnnnnnnnnnnnnnnnnnnnnnnnnnnnnnnnnnnnnnnnnnnnnnnnnnnnnnnnnnnnnnnnnnnnnnnnnnnnnnnnnnnnnnnnnnnnnnnnnnnnnnnnnnnnnnnnnnnnnnnnnnnnnnnnnnnnnnnnnnnnnnnnnnnnnnnnnnnnnnnnnnnnnnnnnnnnnnnnnnnnnnnnnnnnnnnnnnnnnnnnnnnnnnnnnnnnnnnnnnnnnnnnnnnnnnnnnnnnnnnnnnnnnnnnnnnnnnnnnnnnnnnnnnnnnnnnnnnnnnnnnnnnnnnnnnnnnnnnnnnnnnnnnnnnnnnnnnnnnnnnnnnnnnnnnnnnnnnnnnnnnnnnnnnnnnnnnnnnnnnnnnnnnnnnnnnnnnnnnnnnnnnnnnnnnnnnnnnnnncccaccaccacccatcacgattcgaatcctgtcaaaaggttgccacagttgtttccaagtggcccatctgacgtcgagatcacggccaggtaccgtactgcaaagtaaatgtttaagcttctttcaggccagcctacggcctagaactgcaacaccacaagcacctacctacttatgtgtgtgtgagtggatattgaatcaagcctcaagctcttgactcgctgcccaaagccaagcacaaggtcctccttcgtagaatgaatctggcaaacagcttcctttctccacggagcattccattccctccctacctaccctacctaaaccacgccactgctagctattagctacaggtagctggtaccgtagactcagacaaacctcaaccaccaacctcgagttaaactaaaaaatatctctcacgtccacccccaacaggccagcttgtttccatcccaaacaccgtccccccatctctcagaacccaccctcttccaagaatgatgatctcggagttatcaacctcagaacccaccaccccaactctgaaatctacaatcccgagaacccttcatcgaacaatcgaacacccctccccccctaaagcaaggtcgcatcaaaatcccacccactgcacaacccccaactcatgtttccaaccacctactactactgtagacaaaatcccgagatccgaacattcgcataaacctcgaccccccagcccccagcccagcccagccggcacttcagtcttccatttttctcctcccttaaacatcccgcagacattattttcagtctgtataccaagaaaaaaataaaggtgtgacacacacagccatcttgaaaccggaaataggctttacagtccactaacctacctacaccaagccgcacaacacaacacacaaaaacctccttccacatctcgacaattacatgcaccaaatataacgttaaaatcgcgttcattaaacaacttccctacttgtgctcatctcactgcttgccccccccccactccctctttccatcatcctaatactactccctttccataccatctccccttttcatcccagcctaccccctcagctttccagcaatgatgtccctcggctctaaaccaccccatcatcaacttcttcccttcacaactcattgcactgatatccccccacaccggaccaaattgttccttctcctcttctccatcttccataattctttacatactatccacttaatcttcccatcagacctcatctccatttcataacctccgtagtagcattgcaatcaatattacaaaaaacagtattgtaatggctaacagattacaaagcataagggttaagagagcggatagtcaagcaactgcaatacttgttagtcatcatgatactcattaaacagcaacaagaaaaaactcacggtgggctcttgctgagatccgtcttgagaatgaccggcacgcgcgtcatctcggtaacatcctggatgtactccccgccctcctctctcagcttgaaaagcttgagatacttctccttgttggtaaggcgagtctcgggcgcctcggtaaccggcaccttggaatccgaccgagtgcggtgcagagtcgacgaagagcgagtaggcgagccgggcacgctctgagtggggcgctcggcgagagaagcaccagccatggcctcggtgatgtcagaagcattgtcctcatcatcgtcaaagagagcatcggccgactcgggcgcaatggtgccagtctcggtctgcttgcgagcagcctcctcgcgctccttcttgacacgttcagcctcctcggcctggcgggcagcggccatggcgttggaaaccctctgcgaggcaccgccagccctgggcctctcgtcctcggggacgtaagccgagctggggacacccttctcccagtagagctcaagaacacgcttctcctttctgaactcggccttcttgagagggagctggtcacagtggacgcgcttctcgaagccccagtcggggatgagcacatcaaacgccgactcgtagacacagacgacgataccctcgctgatgagatctccgttggtctcctggcggaccttgtccatggtacggcaggcctcgatgtggacgctctgctcctgagcattctgagcagagtccttcttggtgttgcaagactcgaccgtcttgatgagattttccaagtcttcggtgtactcggtctcggtaagaacagcttcaagctggcggtgaaccaaaatgtcggcgtagcgccgggttggggcagtgaaatgagtgtagagcggcacattaagagcataatgagaccaaaggtgctgggcagtcttgccagcaataaagtacttggcgcgttgcatcgacttcaggagcagtgtttccatgccctttctgatgtcagaatcgtccactctgaacaggctgttctggagagacccgctgctggtcgagtcaatctcatagcccagagcggacatgcgctccacaaaagtctgcagacggcgagagttgggaggggcgtggcggcgcagaagggccttctcgggaagagcagcggccaagcgctgagcgacgtaggtgttggtcttgtgcatgagctcttcaacgagctcggtggccaagctgctatcaaagacattgtgcttgaccgggatgttctcatcgtcaagctgctggagcagacgaagaggggcaataggctcaccgccagcaccgaggcgtgcctcgtggaacttctgggcaaggaggctgagaagctggatatccttggcgccagcaacggggtggctgaagccggcctggttagagagagcctcgtcaatctgagacagcgacaacttgccgccgctcttgacaatgccctttccaatccaggtgtcgccttcggcaacagcgccagtgtgtgggttgacgtggaagacaacgctgacggtcaagcgatcctcctcgggagtcagggcacagtactcgccggacagcctgggtgggagaagagcgcagaaacggttcatgagctgaacggcggtgccgcgcttcttggcctctctgtcgacgagcgaagctggcttcacgaagtgagtgacatcgggaacgtgaacaccaatctcgaccttgccatcaggcagtgtcttgacgtggacaccgtttccaagctcggcagtgctttcgaggtcgagggtgaagaccttctcgccacggaagtctctgcgggagccgagggccgcctcatcttcctttgcgatagtccagtcctgagggttcacactgcgcagaacagcatcggagaactcatccgaagagaagttgttgtcacgcaaaagagcatccgtttcaaccttgagatcacccatctttccgagcttttcgaccaaagtaccgaaaggatggagcgaggtgatgggccagcgcttgatgcaggcaacgaagatctggtcggcgtagtcctggtgcttctcaacaaagtcacgaggagcctgttcagtgggaatggcaatcaagggaacacgcttgtcagtaggcttgaaccacacaatcttgggcttctcctgggcgcggttgtcatgatggcgagagttggacccatcacgagcggcgcgctcggcctcctgcttctccttggtagcctggctgctgggacggaggagacccagggtgccggagaacatctgaccagccacacgctcaatgacagcaacaatatggccggcataaagaggcttggactcgtcgttgatctcctcctcctcgacgagaaggaggctctgaccctccacttcaacgtcgtcattcttcttttgggtagggcgctgtctcaaactgccacggcggcggaggccaccttcggcgccattgtcatcattagtgctgccctggtttgttccggcggtggacccagagcgagtgtcggtgatgtccttgcgcttcttcttctcctccttctcgcgcttctgagaccacacctcgtcgacatcaaggagctcgacagccaccaagtcaccctcaagggcgcggttgcgatccttgctgccgcaaataaagatatcggcatcgagcagaccatcctgagtcgacacataagcgtcactacggttcttcttgttgacccggaggatacccgaaaccagctgcccgtcgccgaggagagcaggaagggtagcctgggggaggtaaggagtgaaaagcgtcttgcgctgttgctgttggggctgctgggcggccatttgaggagcgtgttggctggcgccaagaccagccatgtgctggccgctcatctgagcaatctggagagcctgcagctggttgagctgcatagggttgagctgctgaccagggaacatgccggggaccatcatctgcccagggagctgcatcaactgaggctggccagcatactggaaagcgcctagaccagagatggactggtggttgatggacccgcggctgcgatggcccggctggaacccctgattctgaccggcgccggcagactggtcctggccctgattttggttctggctctggttgcgccagttgccatcaaagttccgagatccagtgcgggcgtgacctccgccagcaccaccaccgcggcgttggaggtcgtcgccagaaaagttcataccaccaccacgtcctccacgaccaccggcgccgacagccatgctctggctgcggccatgaccgccgccgcgaccgccacggaaggaggaaccttgtgcgatctggctgtcggctggggcagcaaccggagcgggcgccggggcggcactagcaccctttgcgtcggtttctgtcttttcagcagagcccgaagcaccaggggcggggaactggaagccggaggtggtgcgcttctgctgggcgatttcggcggccttcttggcgtcagcgagggctagggagtgacgtctctgatgaccacccccggcgccaccacctctaccaccacggccgccagcgttttctcctctctgggcgggttggaggttttcaaagttgccaaaggcagatcccgaggctccagcggaaggggcgggagggggcccccccatacccatgttgggaatagccgactgattacggcgatgtgagagtggctgtgtgggaggggccaaggacacattttgctgttgaagctgattcgggaattgaaagccggtctgcggcgaaaggttgggcatggcttgctggagagggttgaagccgccttggcccagagcctgagcgttctgcaacatgcccatgtgctgataagtagcttggagctgctgctgctgctgttgcagcagctcgatttgctgcgcaatggccagttgttccactgcgaagaaaaacacatgttagcttggctgtttgtggcttgaggtgatggttggtgagggtggtgattgatggatggcagaaaaggggcgaattcaggggtagcacttactgccgggattcgcatacatgctcatcaacggggtcaactccgaagggctacggcgatgggcgatatgcagacggcggccggtagggccaggcacacctccaggctgggcctggggttgctgtgattgctgctgctgctgctgctgctgttgatccattgcgactactcaggggctgaggtgcgtgtggatggtgggcagacagtggacagacggacaaggtatggatgcacgtcgagtgcggtgcaagtgtatgttgttgcgatataagcaaacggacagcgggaggcggatgcagacaggagtagtcgataatggtcgggtgtcgtcgtgtcgttttggtttgttgcgttgctgcgttgcgttgttgttgctgttgctgagctgtgcgctgttcttttggggggtttggtttgtgaatgtggagatgtcgcccacagacgctgcggttggcagaggcagaaacagttttttgaatttcgagtccaaatgggttaatgaaagattgaaaaatgcgtcgagctttggggagggagtgtgggagtgggagaggtagagagggcttggtgtgtgagagctgcgatagctgttcgagcgaagcctgaagaggggacgggggaagagagagaggtagaagggaggtcggggcaaggagggtgcgattgggaagacgggaacccggaggtcgttgatgacgatgaagcgagacaagagacagacaacctgctggaagagacagcggaaaggaaaaggaaggatgctccagggcgatggcacagtgcttttgggtggcttcgaggggggagggtgtgctgtggcagctaccgaaagggtaaggaaagtggggttgcccagtgccacggccagcaaatccgaattgaaggcgtgacgcaccagcggcgtccccaagctaccgtcccactattcaacccctgctcaagcaaagacggatgcagccagaggccaatgggctccattctcctgcagccgatggggagcttcacttctctttctaccacctcaccactctgaccgacactttcttcctaatgatctgaacaacctggaagaatataaattgtcttgtggctgtggtgaagccctctctgtttcaaccctctccgagcttgaagatatcaggttacaggtaggtgagcaaagaggggaacctggttttttcttctaatctgggcattgcgggggggcgagacgcacgcacggctgttttgtgggactggcttttcgtctacaacctcctcccaactgacagctcggggacaatcattgactggcaagacctgttctggtgaaccaggctgaggcggcacggtgtttggttggagctgtcagaactgtcgagctagcccttgatgatgcgtccagtccagagctctgactgtcaacttgttgcggcacgaaaccaacattttcggcagtgttggaagagatggacaggaatagctaaaacattgcatccggatagtcatttgcccggctactgctaaataaagagatatatacgatggctttgatcacatctttttgctgataccagactacagggtggattgcaatttgtcttgatggagcctctgagttctagctctgaaactgttttgataagctccgatatgtggctccaactgtttgttccattggggtcccggcccagctcttggagacgctgcacagctggaagctccaaaccttgggcgacgttgaagcctggagactcgtacccgtcgttcggaattatccacaacacccgatgtctttcttgtccccgctgatcgctagcctagttacatccaatgccccgattgagatgcggccatgtctcaatgtccaacaggagcaagagcaagagcaagagcaagagcaagagcaagagcaagagcaagaggtagctgtcaaggagcaaggtagcaaagaagggttagggttgtcgacgttgctttgttgggcaactcaaagcagatcatctgctgcagggatcatcttggagcaggaaaaagttagacaccaggagggtgcatctaaccccgcgactttcttcattcgcggttcacggtacagcaaaagaacaatcaacgtcgcgacattgaccacctgttttcccgcgcaacacatccaccctgccggatctcttgatcgacgccttacaagccataagccgggcgcgtcccagcaacaaaacggcacgatgcagcgagcatctccctcgccagcgcggagctatgatgtcgccagccctcaccgagccgatctcgcagaaatcttcaaccaagacaggaactcgccggcgcgtcacaggcaaatcctcgagacctcaagacaagaacataccagaattcgagaggaggccgaaagggtgctgcaagaggctcgtctgaaggaggaaagagaccgagtcctcgaacagagaagaaaagaggaagagaggatcaaaaccgagcaggaattagctgccgagcgcgtcagattaaacgaactcaaggcgaaaaagatcgagattcccccgttactaccagatcctgaaccaccaaagccagccccaaagcccactccaccagcagctgtttctccagccaacaaagtcgatgaaccaaagccgacttccgtactcaatggagccggtccgttcgggtcaacagcacccacagcacagccatcatcaggcttctttgctgccaaggcgcctccagccccgacaccatcaccatcaccaccagtacccgcagtagcaccagctgctaagccagcaaattcagtcctcggcatcggagggttgcttaatgggaccaaccagaccaatggtacggctgggacaacaggggcagtaccggcagcgcttccagtagctccaacggctccagcggtaccaaccatcgacagatataccgtgatccacaagaacctgaaaggcctgcggaagatgatggcagaacaggccaagaccaaccgggccctgaaagagagaatgggagatatgaggagagaactcagaaagtgtataggccagctttctgcgggagctcctggtgtaaaccggtcgcaggcacgtacaccaaggcggggaccttgtctcaaaattcgttttatgctaaccgtgtaaacagcaaacaaaaattactaatttattgcgcgaggcactggcgaaccaggttcagtcacagctcattgacccatcagactatgtctttgagccaagacaacccgtcgaaggagcagcacgcaacgagccagcactgccttcgctgttcatttacctcctcaacatcttcagcaaaggcgccatctcgcagttcatcaacgaagcctcagcacgaccagagacagctgacccggtaggcgtctgtgtagccgctacaatctcagaaccggactttctctggcgaggaaaatcaatgattgacattttgctggccaagttcaggatagtctgcccagtcctgttcggctaccgaggaagcgaaaagaccgagcaagggcgagcaagacttgggtggtggaaagacagcgggcgatggattggtgagcaacaacacatggaccggatgacgggtctcggtgccgggttcgccgccatctccctccgcaagtttgccgcgtccaagaagcaaaacccgtatccggctcggcattactggaccgccatggcgcgtatagtgaacacgccggcggttgagatcagcaacacgcagtgtatcgtcctgaaagccatgattgagaactacgaagggaaattcatcgacgcgtacggcagcgccgcggttgtcgctctgcggacggccctcgtcgagttccctgctagagcgccgacaaagggtgcggcggtccactcgcttgaagtgttggctacactacttaagaagaacaccgggttgacattgggatagaaactgcggtggaaccagagggttctttagagtgggggctgagtgagttttggcgtgtattaatacccagcggctgaaaaggatataactcggggaatgggaaagggtcagcatacaaatttatcatgatattgctgggtgggaagttgtgttgggggaaaatgtttggttagcggtttggattggctcaggttgaaccattctgtaacagcgtgtgtgttgtctaaataccctacaagtgtataacacaactcctaaataacaaataccgtcccaaacgccgtataaacatcgctgtgacaagaaccgtagtcaagtcccgtatatctacgctgatcatgtgcaagaactccctgtcttcccaaaaaaccaagtgccctacccacctcaatcaaaacaccctatagaatcaacagtatcaccaacaaaatcaccaaaaccaatatcagcaccccgatacaacaactactcagcgtatcctcattcctcttcaggacgtacttcatcttgtccatccccgtctgcaacctcccccctaccctatccgccaaaccatccaccacctccaacatctcggcctgctcctccagctcccgccccatactatccgcctgccgccgcagattgcccactgtttggaagactccgtccagatgctgatcctgctcccgcatcatcatgacctgctgctcttgctcgaactgagcggcgtagtcctcccccctttcgggattgtcaagatcggcgaaggaggatgggtctgggagactgctggaggtcttggagagctcctcgcgcatgtcgtcgatttcattgcctacttcctgcacgaggcgtttgcggcgggtgatttctgttggggagaggttgaagtgggaggggttggtttcgattgcgcggatggaggcgaggaggtcggataggtcttcggagagggattcgagggaggactggagttcggcgcgggcggagatgagttctggggatggggtggtggtggtggaggaggagagggagcggatgcggaggtaggaggtgaagagggggcgggtggtttggagttgggtgaggacatctctgtgtgtatgttgtcagatgaaaggcggcgtggtatgtgtagggggaggggggcatactgttggacttggaggaaggggtcctcttcactagtcgaggacatcattttgaatggttgggattgggactgcgccggaggttatgggattggtggcatttgattttagagagggataggattgttatataggatgccttgaagtcttgcgacgagttgtggacttgttattaaaaaaaagttgagatgtgtttgctggtaaaccttgaaggatgacgtttgctctgctctgctctgttctgcgccaaagaggtgcctgttcacatctccagttccctgcacgcgcgtctctacattcacgcctggtgtccagctgccggattggagacccagattccaattcaacgctatcccctttgcgtcacgggactggatggattggagccttggctgcgcaacggcatggttttctcctatatactggcatgctaaccgcatccagaataagtccccagggcttgagttttccaacataaaaaggtctgcaaaacacaggtaaaaacaggtccttaccgtgcactttatctcttccacacgtcccggaaaactctggaaggcccacgtatagatagttgtgtcaaaattcacagggccatcagagccatcgagccatcagagccagccgtcaaagcctcaacaccgtcaaaactgtcaaagccgtcagggccgtcaaggctatggctgtgaggttagggatggcttcggcctacgtgggtagtggtagtagtggtagtggtttggtttaaagaaatcaacattcaaatttaggaagggtagacttacatattgagacctacttttttgcagtgtttttggtttaaaccgatgtcaggaatctctcgtggaccttttggccaggtctggttagcgtgccggtatataggagaaaatcatgccgtcgcgcagccgggctcgatgagatggtcccctcgcccccatccattgccccgcactctcaaccactcacctcgctgtcccgcctccagcccccctgaagacaccccctgtaaaccggccccccccaagctcggctctcacctgccgcaagcccaagtcgaaacagaaacgtagcttcaactgatcgaggtggcagcaacaacagtccgagttctggacttctcatttattttctctttttttcccttcccccgcattcttgtcttcaattgattcattcccccaattctctctccctcacagaaacacacctcacagaagcaagacacaatgttcagcctcaagcgggtcgtcctgaccgccaccgccctcctgggtgtgtcgatggttgctttctcccaggttgctgaggctgccaagggccccaagatcacccacaaggtctacttcgacatcacccacggtgatgagcccctcggccgcatcgtcatgggtctctacggcaagaccgtccccaagaccgctgagaacttccgcgctcttgccactggcgagaagggcttcggttatgaggggtctaccttccaccgtgttatcaagcagtttatgatccaaggtggtgacttcaccaagggtgatggcactggcggcaagtccagtaagtgttttccgagggtttcttgagaatgagacatggtgtactgactagaatcgcagtctacggcgaaaagtttgccgatgagaacttcaagctcaagcacaccaagaagggcattctctccatggccaacgccggaaaggacaccaacggctcccagttcttcatcaccactgttgttacttcgtacgttgaacctgtccgaaatactttggaaggagctttggctaacaagtcccctgcagctggctcgatggccgccacgtcgtcttcggcgaggtcctcgagggctacgatatcgtcgagaagatcgagaacgtcaagacccagcctggtgacaagcccgagaagacggtcaagatcgccaagtctggcgagctggaggtccccgaagaaggtatccacgtggaactctaaacacagcgttattctttacatatacccttttttactttcattcttagtgccgtccgtgtgcccaggttttgctgtgctcctcatccgcaccttgtttgctgaccggggatgtgtttgcgtacccaggccacggcgaccaagatgaaaatcgagaaaccatcacctttggagttcacaaggccgatatgaaggatatttcgtcatgagattacacacacacacgaagcaaaaagacatgaaattgatgaaaaaaccacgagtgctgatttatgggcttttgttccattgcgttcttgcagacttggatgatgactctgcagaggtcaccgacgacgtttatccgaccgccccgatcgagagcagcggttgggccatctttggcaagttttttgtctttgccgctgtggtggcttctgttgttggctatcttcgccaacgccacacgcaaaagtctaagaaggctcgttatgagaagagcttggcgtagagaggatcgtaggattagtggggagctgggcctgaataggtattccttcgtgggagacatgacaagctgtagaataaacttggtaaactttatgggccgagagcaacaattgctctggttgtagtctcagcatggtgctgcttgttcttattcacttcatgatttcggtttacatgcatcacgtgggcacccccgtttcaagcatcttaaatttttgggcttgtctatcaaccaaagcactcactcatacatacacactcacactcacaacttaattctccacgaccacatctaacgaccacgtttgatagatacccgaaacccgttttcttcgccgaacgttacccctttcaccaccgggtcatttggaaaagaaaacagccaaaatgaaactcctcaccctcaacttcctcacctgcgccgtaaaaacctgcaagtcctcctcggactcgttccccctccacccaaaggacgctgagctcgcctcggacgacgtcgaggtcaacccggagctgttggtcaacttgcttccgaggctggactggaaggcgctcaaaacgacgtccgcagaggtatttctcccctcatgcatctatccggtataagacaaaacttcaaccatactgacagtgagtgtgtatagctcggcttcccccaactcccagactccccaccaaccatcgaacaactccaatcagacgacaagttgttgaaagacctgcactcgctgctcatggagacgaacctgatggagggcaagctcgtctgcggggtgtgcgggcatgagtatgccgttcgggaggggattcccaactttttgctgccgagtcatttggtttgaagtttcttcttttgggtggacggacagtttgaggaagagcgggatcgatattgggagggaaaggcaaagaatcacgattgggcccggaaaaatcggtgcatatggtagagaaaatagctgtttgcttgtgggaatgtgatggcatatgggatggtggttaggttgttcatcttgttgataccaaaaaaaaattgcaaaaggttctgaaacacaaccttttcctgattttatcattgattactgggaaagacccgttacttcaaagtcaatgtgcaattcccactctcattctcggttgtcactgacaccaaccatattcagacaagaacctagtatgaaaatgccacaattatgccctcgcccaagccattcccaactatcataactccatccaggccaacaaaatgtaggccctaaagtaataaacaagaccaaaaaaggaaaacgacgaaacaaatctatgctacaagagttacacagttcttccaatacagcccatccatccatccatccatcctcccttcttcattcacagtcatacccatacacacacacccgcacttacgcccagtatgtttactgctgcttcttctgcgcagccggccccatctccttatcaaacgccccatacgacacctccaaactagccagcgccttcagcccaaccgtcaaaatagccagcacaatcaccagcgtgatcagcgccataaagatgcctattttttgtcatgtcagcaacccactccccccttttcactttccacttgtaaagacttaccaggagtaaaaaactgatacttctcaaacaaccccctcgtatccctctccgtctcattccccctcctattcaccaccaccccctcaaactcatcatccaatcccctcttcaaatccatatgccccgtagccaccccgtcaaactcagacctataaggcggcaactcagccgggtccgagaaaaccataacagtgtacccctccccctcctcatcaagggcagacatcctctccccaagtctgtgatctacaccaaccaatgtcagcaccacccttcacagtttgccatgaaagaacataccattatcctccagaatctccaccctctccttctcatccccccccccaacaacaggaggaagacccctcatcctcacctccaaaagctgcatcgctccccccttgacatgtttgcaggactgggcgaccagctcctttagctcggtggcggaaatctgcccgataacctctgctacgctaaaggcggactttgtgttttgggcgcgggtggccttgcagaggttgggggtgtggaggcagtgctccgaggtgcgaatgtctgccgcgtggaggttgggttgggagatgaggatgtacttgtctgttgggcagccggagaggagggacttggttgtggagaggactgaggaggatgtttggagttgggggttggagttcggggtggggaggctgtagagggagagggggggttaatattttgggggatatggcaagggggaatgggaaacgtactcggcggaggagaagaggataaagggcgcggaatcggtaaaggcgttgacgctggttgctgctgtgcaggccagcagggtggctgcttggctgatacgcatcgtgttgttggtgtaggtgaacaaattggcttcaactgggagagaagtgaggtgaacttggcccctctgtcgttgtcttgaatcgcgaggggtgttcgatgttgtatggtcaggaaggtattcaacacaaacgtcgcgggtggaggaagctgtctgcgacaagtaaggtatgcagctggctgggatggatgatgcagctcggtctcgctcccgtcgtatccaccaaacccaagccaagacaggcgccaccaccaacgggctccttgcctgccacccgctgctgcaaaccaggcggtgtggggcggcaagaatcccgataacaccagcccgcgccgttagcgaaaagttacaggggatcaatatcgccaaaattacagctgccgggccatcaactcaaccttctcaacatcccacctccatcccgtcacaaccaccccccaattgccccccaaaatggacggaaccgccgccatgttcgcccaaccgggcatgttcatccagccccgagtccgcaaaacagcccctccaccccccaagaagcgcaaagtccagcacgccgtcgaagaagttacattcgaccgtacagcccgcgaagaatacctgaccgggttccacaagcgcaagctagagcggaagagacacgcgcagcaaatcgccgagcaaaaggcccgggaagaaagaattgagacgaggaagcaggtgaggaggagcagcagacttttggttttcatgggaatatctaaacagccttattctgacatgtgtgtgtctactacggtaacagattagggaagagcgcaaacaagcccttgaagagcacgtccagaccattcagcaaattctccgcgaagccgaggcagccgggacaggtacagcaggcaaagacggggagaaggacgaggaatggggcggcctgtctgacgacgaggtggtggaggcgcccattgacatggaggaggagtacattgacgaagacaaatacaccaccgttaccgtcgaggctgttagtgtggaccgagacggtctgcacaaaccaaaagctgtctcttccgacgacgacgaggagtccaaaacagagaagccagaagacgaagacaaacaagcgaccaagggcgcgaagcgtcccaaagagcaaaagaaaaaaaagaagtttcgatatgaaaccaagttcgacagacagctcacagagagaaagcaaaaggccaaaaagaggaaggcaagaggggtggaataatacagacacggcagcaataaacatcttcaggggattgcggtaccatgaccaccatgtgcttggggtaattgtgtgtatttgtgttgtaaaaagccgcaaaaactaaatactgtaggcagtgggaaaaccagtccaaacatcctccttctgtttccatcaatcgacatacggcgttgaaaacctcacccgagaaccacagcccgagcatgtttgtgaagaaaagatgccaccgacgagacctgtcccgtacccaacaacagcaagctggatgagcgtcgcttagatgttgccaatctcgttttggaagtcctccagctccttctggacggtggcgtacttcttggccatctcctcgtacttggactcccactgatcgcgctcctgctcgagagcctggactttccgctcgaagtgtccggccttgacgtcggtctgtcgcaacctatggtgaggtagatgaggttagcattggtcatgacgccgaataggggtagacaagaggcggcatacttctcgttggcctcgcgcaaagtcttatctgcttgctcagcctcttcctcgagaagttggagtctccgagtcagcgtttcgttctgggttccgtgctgcgcgccttcgctggcagcgctcttgaggtccttgacctgagtttcgtatttctctacctcggactctagaacgctgttcttgtgcgtaagggagatgatctcctgctccttctggaggttctcctgctcgagcgccttgaccttggcctggagctcttcgaccttggcagcagattcctcagactccaaacggagctgggtcattttctatgagttcacatggcgcatgttagctcgctggagcaaaacagagccgttacagcaacatccgtgggcaaaccacagcaacgacactggcaccggcaccagcaacaccgaaacaccaaatggcggtctctcgtgatggtggtgggttgtagtaggggggaacctgatggtggggcgccaaacaagggtccatctctcgaatgttccaagacactcaactcacctccttgatgcgatccatggtggtgttgggtgtgtggaaaaggtcggtttggttgtagagaggaggacgagttgttggtgttcgagaaagaggtcgcgggtttgcagatgttcaagttgaaagtcggatgtgttgggcaataaaaggagaagtgggtggatgagagctggcaaatgttggtggattaggtaggaaatgaagacaaggaagtgcccctcacttggctcaccctccacccccctccactccctcctcctggccagcggccgcgtttccatttgctgccgacgggtggcagtcacttgtctgatcaccacccccagcctaaaaggtggggcactgttgtcgagctgcaccaagagcattcggctgctgcgccgttgctctgccaaccaacttgttctttttacggatgccgggggacagagtgagacgcgaccaacacggtcagacgccgcgaccaaccactgcaaatagaaatcattccaccctccttgtgaaacgggacatgccaaacgacctccagacttcggacaacagcaacaacaaccacgacgcacactcgacactcgacaatcgccagctgggaggccattcccagattcaacccgctgcgacaatgctggcagcccaccacgaccaggagaatgtgtacgtgcaccaggccggcgcctctaataaacagctgggagccaaaacccctggcgcccgctatccgaaaacccccctgaaaatcccactcaacgacgagaatgccaaccacggactcggaggaggcaaaggagggctattgcagaccaagggaaacaatggattggtaaagtcgggcaagcaggccttggtgacgccagctggtgagcttattttcttgcttttgccaattgtgcatagttcttcgctgacaaacatgcagcaccccaaactggtcgagcccctctcgggaacaaaaccaccaatggcaaggctcgggcaactcagaatacccagggcgggaagggagctgctctcaagacaccgggaccgaggccgacaactgctcaacgaccaaagcaggctgcgccccaaactgggccagccaaagtcgaagtccgtgccgatgttcagcctcccattaaggccgatgacgaggtcgagtactgtccaccaaagcccagggacttgccttacgaatccgatgtgctgcccgatggcgtattaacattccaggggttgaagcctgagaacctcttcaacgactactatcggtactacttcaatcgtgtggatggccagggaaaatcggccttggaaagggaaatggaagagcggcaacagcgaaagtttgcgcgtggtgatgagcagattcgcttggacatggaggggtttgactggagcgtgggggatgccccagagagccgtgatatatttcagaaacggcaggagaccatcaaggtggaagctatcccggttgtcaagaaagtcactgggttgggctcaagaccgccgtccacaattgcctcccgtagagcagcctcggctcttgctgcaccaatcaactccatccgcggtgcgcctgggaagaccgcgatattggctcctaagccgcagccacgaggcttgctgttgcccaagagaaagccagccgacaacattctccaacctggtacattcacgcgggatacggcatcttcaataatagcctcgcgcgatacactcggctacagcaagggccgttctgcctcttcagcaattcatgggagaaaagagtcggtcacccgaatgccagaggttgccccaaaacctcgccccttgagccgctgtctgagcacagcttcttctggttccgatgcgacgataacgccggctcgttttgcccagtcttcgcaagactggaagagacctgactttctctctatatttgatgtggaggacgatgacagcgctgcgagcacagcagtgccccaagttgatgatgatgaggaggaattccaaatgtccacagacttttagacagcaactcgatacaggcatattcattggagtaaggttggttgtgttcggatatggcgttggaagctggttgcacggtttctagcatcaactgggctttgctgggtttatggttgtaggggtatttgttttcgggtttatgtttgagattacggatgtgggaaagggtagggaatcaacactgcggaatttggcgttatccaatttatgtctctcttactttgtaattgatagggtccaacaagacatttgcaggaaggctctttccaaacaaaagcattgctgtacgaataaaaataaacataagatgatgtcatcgtgacttctcttggtttaactttgtgattccttttccaagtcaacttaactgtgtacaactacccagctcgttgcgtggcagccacatctccgcgtaacggaaagtcgtgacctggaggcagcctggtcaatgaccctgatggccccttttgtggattctcaatggatgccccatcaaccccttttcaccaatcttccagagctgaaagactgtcacgtgctcctcgccaggccgccacagctggaaatcagggcaggacagctgcgccaccacggccaccccttccactagctacttacgcttgggccatccaggcacgggcattggcgctgaatgccaaccgttttaggtttagcgagacaatggctcgcgacttcatcctcctgaacattccaatgtctgaacttcacttctgcctttgacaaagaatcgtgccgttgagctcaatcaccacagcgtcttctcggtcgccaacagcagcggattgtcgacatccatctctgccgccgccagagttcatttacccgtcttcgccaagcatccaacaccgcccatccttttttttttgcggcgcggtctccgagatcctccctccctttgtcggcaaaacttctgtcgcgttgagggcccccgtgcgcgtcatttccggccacatcgcacctcctccaagtccaccctcatccatgaatggtatccctccgcgccgtcgcttcgagatatgatggttggaggacggagggagcgataacaggtattctctctcgcaatgactcgagctcctggcgcgagttacgctcagttctttcctgctgccccccgggtcgttgccagggaccggacaagggatcgggaagatcgcgaaggtcccaagggaagcaccctcgattcgtcgcctttgccagatgataccaccaacggccacctcacctcgctaggccccgcggaatcctgtccacctcagcaggacgggcacatccccccgagcgccatggccggcacgagattttcgagcagccagctcacccctccagcttccaacgactccccctcatcccatctctcatcagctgcccagcagccgtcgacgaccgtgcggaacaccaacgggtatcacggtcatgtcccaatacagaacgaaccgctccagaatggcacgtcgagtgttctgcccagtgttcccgaacgcacctatgcccgagacccctcacgcccgattcaaaccgtcgtgtgcacatatgatcctctcatggataagaagctgccgagcggtgaaagaatgaaaacaaaaccgaaatataaagagtttggattggtatgtacgcccgatactcatatatactggagagaggtgggggggggggggggggggctctcttcattcctcttcccccctcaatattcactcccctaatcactctcccacaactaaccttctaatatctactcttcccccccaaaaatcccccccctttacaaaatattaaccctccttctcttacatcaacatttaactttttactaattctaattcacttttttttccatatttaaataaatttttaaactatataaaatactaccttatattttctttcccaactttcttttctacaaatattttttttactctattaaattctattaacctttttttttatattaattactttttttctttatttttataaattttttannnnnnnnnnnnnnnnnnnnnnnnnnnnnnnnnnnnnnnnnnnnnnnnnnnnnnnnnnnnnnnnnnnnnnnnnnnnnnnnnnnnnnnnnnnnnnnnnnnnnnnnnnnnnnnnnnnnnnnnnnnnnnnnnnnnnnnnnnnnnnnnnnnnnngggataccttgttggtccgtaataccgcgcacaggacggtcaagatgacgctcccccccaagatccccgccttgcaaagggtggccgcctcggttacatcaacgtcgacttccaccatgcgaaggcacgcctgcgccagaccccctacagtctcaagcagtacaaatacgaccccaaaacgtcttgcgggcccggccctccgacacaaattgtggttacggggttcaatcctatcacccctttctcgacggtcaccacctgttttgctgcttttggagacattgctgagagcagcaacaagctacatcccgacaatggtagttaccttggttttgcaacctttaggtacaaagatacgaagccgaataggtcgcggcctcaagtcattagtgccgccgacgcagcaagaaatgcggtccgtgccatgaataacaagcagattgcagggcgccttgttcgagtcgacttcgaccctgacggaaagaagagctccgaaatgctcgttcaggccatccgaaaagactcagaaagacacaacagtgtcccatcgacggcaagacctattcctacaggcccacgggctagtgtcccaggacctcctcctactgcgccgcgaggtccagctgcccacagagcaccaccacctccgcctcctattgccggtcggggagcgggagcgggaccagtaccagtgccaggaccgccatcaaccaggcccgtgtacgtgatcgagactgagagcgtcaaggaaacgatccgggaagcgccctacatcttcgtcgcccacgagtacgttccagtccagccgtcaacggttatgcacatgaggaagcgccttaaagtgtacgccatcgagactattcgcgccgataagagtggctattacgtgatttttcacaacagcgaccggggtcgccacgatgttgagcgttgctacagggcatgcaatcggacacctttcttcaattaccttatggtcatggaactcaacacctacgggtcagagggcaggggctcaaggacatctcgagagcctcgaagacacagtcgaagtcctgagcgcaggcgagtagacgaccatcgatcacaccgtgaccacgaccgaggccgacgtgatgaggatcgacagaaacgggaggaacaagaccgacgaaagcgtgaagaggagtcactgctaaaggaagagaaggatcaaagagccaagaacttcgatcctgtaatcgaagctaccaatgtggtaattcaacagatgaaggagcagctcatcaggcacattcgaaccaagattgcggcgccagccttgttgaactttcttgatcctgccaaccaggtggccagccgacggaagcacaacattgaagacccgcattcctccaagctctcgatcacttttgacgactccgacaccaaatcaccggttggcacaccgaattccagagcggatccaatcgagaggcgaactggtcgactggacgtgtctgcgcttccccgaattcgcaaagcgaaaaatgctgctctcaacgcccgcaagcatgccttcaacgacccctttgcgcgccaccgacctcccacccaacgctcgacgtttcgatctcttcatgaccgcctgcaaagcgatagcgatgatgactcggatgacgaggtggatcacaggtatttgaatgttcggaataccgatgaacctgaatctcgacctcgtagccgctcgtccacggatgacgaggctaccaaggaagactatgcgtcatggggcccagctgaggaagattcgatgacggaagccagctttgcgttgactgacgggccggctcttccccgaaaaagaaagctggacttgcagatggagacggctatcaagcggcagaagaaaacggacgaggagcttttcggagtcaccatcaaccgcgtcgacccaggttacccctcgagagagctttcgccggaggatattgtgctccccgatgccgaacccttggaggagagggacactgatagttcgcggatgccgacacctgttcctcagggggccaaatccaaaaagaaggccacgaaaaccaaaaagaagtccaagaaacagattttcgaggaacgtgaagccctcaagcgtcagcaggaagagatctttgagaaggaggcctctctggctgcggatgaggtcgagccaacacccgatgctgagcctgaaccgggcatcaaggaagctgctcttgacgaggagccagatgtcgagaaaggagagaaacctcggaaactggaccttgatgagaagatgtatccgtctgagaaggttcgcgcatttgagcttccttcgaacttcattcttaacgaaacttcgcttcgggcttcggttctgcctgcactttcccacgctgatctgccgaatctggaaagattgaaacagaggcaggggagtggacatctggagcaacctcaggtctgggcgtggatgcgggaccgtgttcgtgagctaaactcaaccgatggttcgaaggatactccttgcagcattggcggctactatgtccccaatacaaccggctgtgccaggaccgaaggtgtcaaaaagattctcaactcggagaagtccaagtacctgcctcaccacatcaaggtccagaaggcccgggaggagaggcaggcgcaaaacgggaagtcgggcaaggactcggtcctggctgccgcagaagccgcaaagttggcggcggagagccaggttgctagaggcacctcgcgtgccaatcgggcgaacaaccgtcgttttgtggccggtctgcatgaccagataaggggtctcggccaggattcggacgccttcaggttcaaccagctcaaaaaacggaagaagcccgtcaagtttgctcggtcggccatccacaactggggactgtacaccatggagaacattcccaaggacgacatgatcatcgaatatgtgggcgaggaagtccggcaggtgattgcagagctccgggaggcgagatatctcaagagcggcataggtagcagttatctcttccgaattgatgacaacacggtcatcgacgcgaccaagaagggcggcatcgcgcggttcatcaaccacagctgcatgcccaactgcacggccaagatcatcaaggtggagggcagcaaaaggattgtcatttatgccctccgggacattgctcagagtaagtttacatctaataagcgactagttttccgtgatgtgatcattggctaaccttgtgctccagacgaggagctaacatacgactacaaattcgagcgtgagataggagctacggaccgcattccctgcctatgcggaacagcggcttgcaagggcttcctcaactaatgcctttaatgtcttttcacccttgcccttttctcaggcatctttctttttctcaaaaaaaaatcaccatgggtctgggtttggccacacttatggcaggcgcacggctattctttgtccaaggaggaaaaactggagtccatatactcagggcgcgcggatagggcttatttcggggcaggcgaaagcgggcaggcaggcttctgagcaggtttgccctctcacttttgaggcttattcaccaagcatttgacaagcgatttcaactctcactttatgcccgtttcatcatgacttgggtacttgattttgtttttctcctcctttcccttttctggagcttattgattgggcttacttgtgataaggcggtgcacggatatgataataaagtcaacgttggagatgaagacgaaaaaggaaggggagcaggcaagcaatgggaaatgatgcttgctaccgcaaaaatcccttttgctttgatatcgtggcatacatgtacataattgtaagatttaaggagtctggtgagggagattgtggggggggtatctaggcttaggattcgcattgggtttatggagtttgctgattaagggaattgggattttggaagaatgggagggtggtgtttggtgttctaagagagttatagacgggcagaagcgcgtggtgcctcgggattgatttggtagccaagtaaatgcagcgcatcgaacttgtttttggagatgtcgagtattcacatgtaaacaaaacagtgggagatgctataggcaggtgttgaagttgacgtctctccaatctcttgaaatacagacggagtatctacggaatatttgacagaacagagttgctgggccgctcagctggcaagagggatcgtagtttcagatcaaatggaagtgttggttccttccgcctcggtgagcctgcccagctggtaattacgcggtttagttattgttattaatgacagcgtggaaattaagatagtgtttgggtcactttcctcttacactaactacattgtaaaggcgctggaagttgtctgtcattcttgaaactattctacctacatcccgcgacactggacatcatcgactgcgagcggaaggtctctgagtgtcctggatgcaggcgggactgggactgggactgcgcccgcggttgaaggcgcggccgtcgctggttgacttgttggttagagctgctagcacacagcagcaagcgtcatcgcctccaccgccggctggcaacgacgctccctcaggccccgggtcccgccaagaggagctcctccgaccgggagctccaactgcaactgcagcggcgctgctgattctcgaccaagctgcgaacctcccacttcctagctcgccagaaacaccacgcatcaacacgcccgcatccgtcccgccatcgtcggcctctatttctaatatacctacgctcgtcattacttctgaatcccctccgccatctccccttcccgcgcctacagcaattgttgctcctcccccgaagcccagcatggcccccgtaagctagcctccccccgcctccaactctctcgagacaatgcaagcaagctgttcatggcgtgcgtctttggacatctgcctaaccaccacgccggcgcaccttcaccactaccaccacgaatccgatgcacccccctttttgttacaatgggctatggtcactgacatgatggtgccttgcagtccaaagcagatggccaggatggagtgcacagcggtatgcgccaacccctcatcccaaccaccacattggtggtatatctctagttgctaactgatgggcttacaggcaaaatctactcggtgtctgggttagttcgagccgatacatcccccgataacacataccgaaagatcctcgatggctaacatgcagcccccagccccgtcgttgtcgccgaggacatgattggtgttgctatgtatgagttggtatggttctggttcggtccgatggcataaaagacgctctggctaagctatggaaacaggtcaaagttggtcacgatcagctcgttggtgaagtcattcgtatcaatggcgaccaagcgaccatccaggtgtacgaggaaacaggtacgatgcggctctccaccctgcccggcgcaagcttgccgaagctaacctcgattgtctcacagccggtgtcatggttggcgaccccgtgcttcgaaccggcaagcccctctccgtcgaactcggccccggtctcttgaacaatatctacgatggtatccagcgcccacttgaaaagatctcgcaggtctcccagagcatttatatccccagaggcattgccgctcctgccctcgaccgcgagaagaagtgggagtttaccccaaccaagaaggtcggcgaccacatcgccggtggtgacgtatggggtaccgtttacgaaaactcgttcattaccgtccacaagattctcttgcctcccagggctcgcggtaccatcacgaggatcgccgagaagggcagctacacagtcgaggagaagatcctcgaggtcgagttcgacggcaagaagactgagtaccccatgatgcagacctggccagtacgtgtgccgcgcccaaccacggagaagcactctgccaatcagcccttcttggtcggtcagcgtgtgctcgacgctctcttcccttcggtccagggtggtaccgtcgccattcccggtgctttcggctgtggcaagactgtcatttcccagtccgtctccaagttctccaacagcgatgtcattgtgtacgtcggctgtggtgagcgtggtaacgagatggccgaagtcttgaaggatttcccatcgctcaagattgaggtcgatggccgcatggagcctatcatgaagcgcacaactcttattgccaacacgtccaacatgcccgtcgctgcccgtgaagcgtccatctacaccggcatcacagtggccgagtacttcagagatcagggcatggacgtcgccatgatggctgactcgtcttcccgctgggctgaggctctgagagaaatttccggccgtctcggtgaaatgcccgctgatcaaggtttccccgcctacctctctgccaagttggcctcgttctatgaacgtgccggaaaggtccaggcgctgggcagccccgaccgcgatggcagtgtcagcattgttggtgccgtgtcaccacccggtggtgatttctccgatcctgttacatctgccacgctcggtatcgtgcaggtcttctggggtttggacaagaagcttgcgcagcgcaagcatttcccttcgatcaacacctcgctcagttacagcaagtacaccatgacgctcgacaagtggtacgagaaggagtaccccgacttccctcgcctgcgcgaccgtatcaagcagcttctttccgacagtgaagagctcgaccaggtcgtccagctggtcggcaagtctgcgctgtctgaccctgacaagatcaccttggatatggctaccctcatcaaggaggatttcctccagcagaacggttactccaagtatgaccagttctgccccatctggaagacggagtggatgatgaagctcatgatgggattccacgatgaggcgcaaaaggcgatcgcctctggccagagctgggccaaggtgcgcgatgccacccaggacctccagggcgagctgcgcagactcaagtttgagattccagatgagggacaggagaagatttgcaagaaggttagtccctttactatcatcccctggaagagagaatcatgaactgacaatgaaatagtacgaggcgatacaacaagccatgcttgacaagtttgcttccgtgattgacgagtaaaaaaatgatgtattgttgacagcaaggggcgtcacggttgttggcatattctaagcgaactcattctgggttctttttgcaaagcgcggtcatcgtgacaggttgttgctgtttgtaggtactacaattgcgtttgacatgtgatgattgttgaagggtgggggaaaggggatgggtggtggattattaccctggctttcatagatttctctgttctgtcagtctctgttcctctgtccctctttctgacatacacattcttgggggttcaatggggtagatagtgtattgattagttctgcaaacacttgatgcttcggtaattcggatcatgatgttgtcatgtgaagattattgatgaagcagaatagtttgagacttttttgtatttcaaccgtcattatataccatacatcatatccagttgggatgggtcgttatcgttataaacaagcaacaaaaacatcaacagcagcaagtgactcttttctcaccctctctctccttctcaaaccagataacaacccgcctgcctgcctagccatagccgtccagatagaaccccataccaaccatccatataagcctttgccaaccaaatatttccaacaaactttgagaagccaaaccagccagccagctaataaccatccgaactagaatcaaaccatgacccaaatatatctcctcgatcaatgcgccgccaaagaagcgaaaacgtataatatcccagccctctcgccaccttttttttctccacatctctctgtttgaaagtattccaacacgttctcttttccaacaagatttccaacaaaccattcaactccaacacagacactggggtatccccctcttccaactcttctgatccctcctcttctttctcaaatagctccacaagtcaactcatcccccccccccggaaacgagaaggcagccaatagaagagggatgaaccctctaaatccccttctcctttcccccctgctgccgctgctgctcgggcgggctcaaactccgttcccattccttcataaactcactccccatcttcttgatattggacggggtgagcttgttgagtacaggcgggagcaactcctccaatttcccggtgccgttgggggatgagccgttcctcttgttgttgccgccgctgttcagtctcgatttcgagtttttgtttttcctgcacacaagatatcatcagaacctcttcttttaaacgaaaaaagaaaaaagaaaaagacattaaggtgtatattttgcccgctggctgggctgggtatctcttcaaacaaaggaaaagaaaaagaaaaaaccgttgttgaataaatagaaaacccgggtatcacatcaaacaaaaaaacgaaaaaaatgggactcatacaatggcgtctcttcctcctcctcttcctcctcccctcccctcttcggcgaggtcggatcactaggcataatatccccattcaccgtcgtcccgctccaccgcggactcgacacaccaccacccgtcggcgggctgctattccaattcgaccagtcattatcatccaccgagtcggccgtcagcggcgtccacgagaacctctttgttggttttgccgcttccgtctttgatctcctgagggggagtggtggtggtttaaactcctcttcctgggcagtagtagggatagggttcattgtcgccaaatcatcaaacgccgacgaaacctttggtcgaggattgggtgcgggccggatggtgtcttgctgatcgctgctgtcaaaaaggagcatcctctccactttcgtctggcgcatgttgcccgtgttgtcgcggaggtagacgccctgtccggtgatgggttcgtcgcctaccgtcgcttggcggatgtcttccatgaaggtccagatacctgatttgaggtcctgggcaatctgcttaacgcttgtaggctggggtgtagtcctcggtgcccaggaggcgcgtttggcgaggtagctcggagtaacaggagcatagttatgaacaccatgtggatcgtagtccagtttcagatggttcggcccgtcttcatgtatggagaagccctcgcccggttttgtcggtgatagcagcgagagtttcctcgcgtgaccaccagtgaatacccgtcgccggctcttttccggtgtaggttgctgttgttggtgctgctgccccagcaacgtcttcctcctgtccagctcaatgctcctccggatggcaacctcgtcgtgacaatccgccggcgagtttaacgatcgcaacgcttcgtggtttcgcctgttagctggtctcttcttgtatccctcgtgtagagtaaactcctcttttaacctcgccagctcggcctcggcacggtccagctcttccctcagctccattactcgcctctcctgcgctgctatcgcggtgatgaagtcgattccctccaccggagacatgatggaggagggggtgtctaatggtgttgggggaaaggtcgctgcggtggtggatgctgggacgggtcgggaggggaaggcacttggtggtgcgatgggtagggtcagggataatctgttggtggttctggaggctgaggaggtggatcgtgaggagcgaccctcgctgaacccaccaaagggggaactgggcgagctgagaagatcatcggggattgttcgaggtcgtgtgtcatcttgactgcttcctcggcttccaattcctcgattggcgacgtgccgccgtagattgtttggtgttccttgtcctgccattgtatcgtccaggcttcttctaggtgaaatcatctgatccatgtagtaagggtgctgttggttctttggcgtgacgggtgttcttgggcggggtggttcggtcttctgtgctggtggtggtggtggtggttgtttgttttcaatgataagggggtcgggggcgataaacgagtgttgttgtgacggcttgcgcaaggaggagaattcaggatcaaaggccgaccaagcagctctgcggcgtcgaagaaggcggtggcggggagcggtgtagcgagtcgttcttctggcgacgacgacggccttgtgagcgttcagcaggcggctgtcgcgttggtataaaagagtgtaggcgcaagccgaaacgaagcaagttcggaggatggggatggaggtcatggaaaaaaaagaagagagcagcgctttcagaaggggacgacagtgggtggaaacctcatctcgcccgattcatgcgacccttttttcttattggtgagcagaccttgaccgccaaccaatgctggggggtctcgtccgggggttgtatgggttcgtcggtgcgactgcacagcccggtcctagcagctgtaactgacagggccccgctccagatcgtttgttctgaagctctcaagaataatgtattcgaacgttcggttggaacacgggggcgggtatgtgtggtgttgcggtctctctgtgttgaactcggacaagatatggacgagatatacccgccggacggatagcagccgtggtggcacaaactgttggggtagcctggcggctgcgatcgaatcctctcccccgtcggacttgatcgctcacctaagcactggagactgtggtctggctcgtggggccgacagggaataaaaaggtaaggttgaccgttggccagtggaggtgttgcaagtcgcagggagattccaggaggtcggagaggggcttcgattattttaaggattctcaaaattcatttcgattacctgcatgccgtgttgctccgcagtctcttccagtgccacaaccgcacgcgaggatctggacgatgactggatggaccgatggcgaagacgagggacttgttggccaagatggacgaggtggtgtgagtgggaattcggggaatcgaatgcaagacattccgcggcaaccagacaacctcacaccctacccagcactacacacatcacggggaaaggagcatgagatcccaatgaccttaacgagataaacaaaacattcgaatgcttcgagaagcagaaacgcatggatgaggcgcccggggtatcacctatggcccggatattaaacggggattctatacccagcaattgtttgatataagctgggatgaaaacctcaccagcaatggcttggaaaccgttgcatcgtatacaaaatagaaatcacaagccttctcgaacaaggctgcaaactcggtttccaggcgctgccaactggctgcaaatctcaatttcccctgcatttggaaagtgggacgccccggattttgggatctggaattcttggaggcaatgatgcacggaccacttgacaaagaatctctgattgtactcacgtgatcccgcgtcctcgacgcgcttgcgcttcttagaacggtacagcttgggcaaagggatgcaaccgttgtttcctaatcaaagccatggcaacgtcccggcgacgagcagcttacgatttcttttgccattgagagaaatcgtgggcgaattaatttctggttctttttaatcaattcactaggatccagaacctgcggatttccagcaagcctttctcttacgatccgccagttcgccgctgggtattggctgggtttaggtgtggccaacaacatgccatccaagacactgcgaggagccgagaaaaaggcgctggaaggggaaaatgagtctcaggacactctggaggtttttaaccgcttggtgcaaggctacggtgttggcattgtaagttcttggtggcgctgaataggggacccctcaccttctctaggcttccagcatctcaggattggctaacatcgagacactgtgtaggcaagcagctcacctccaccaccagacctcagcaccacgccgcctccaagcaagcctggtgttcagaaaggtgcgtcagtgcttttctctttttttttttttgtaattttctgtgacgaatcctgaggactgacggatacacatgcacttagacgttggccgcttcaaaaagccaccatccttcaacgtgagtatttttcgcacggttccaaggccgttgaatttccccgcaaagcaaacgttcaacgcccctgtttgtccgttccatggattgcactgaccagcttcacagacgcgggggatgacgcgtgaaggcaacaacaactcacaatctcgtcgtcaacatcgttccggcgtggaaagggcaccatcacaggggtcacaaacccgccaggctcctggcagcgatggcccagacactcagttaacagacatccctgccccaaaccagatcaacgttgcgcgccgagacaagatggactcgcaaaagtcgacacagtccaacaatggtcgaagctatgaccagtactgtcgttcgccatctcccagcatgagcactcggactcgagaacaagcgattgtggaggaagagaatgcagggacggtgcagtttgatcttgataaaattccccaggaaacgccctatcatggttccaatctgccacacgactcgggcttcgttgactatggcacaagtcgtcttcccaaacatgcatctcaccagcccatcttatcgtcgcctcgcccgccagagacaccggctgctccacataacccgtttcgacaaggactctctcagctactttccccgtcccaaatgtttcagtcgacccagttttcatcggccgtcaaggtggccagcccaacttcctcacgaccatcaccggcagagttccctcacctaggatcacttaccggcccagctctgtcatccccacttaaggatcggggtcttcggtcgtcttctgtcccgaacccgccatcaagcccacagattctttcagggagaaagtcatccaacctggaaaatcgacccagcagtcccattcctagcgcctcgaatggaaacaaagctgctactgaagcgccgcaatctgagttgctcccaaggcgaagagcagccctggagccaatggccgcttatgagcctattcacaagtcccaagaaagacgtggctcctcggaagtgcggtcagaccctcctgtattcaaaatggacgatgatgatgacgaggagctacttcgacgtcgaagggcacagagcaaaaagaatgctgcgctcaagtcactaaccgccatcagtgtaccgcgttcagcgaagacgaagatagcagaaatcgaagtgccattgacgagcagtgagaaacaaacgacaaaggcggaggcatatcttgcccagtgccacggcaccgaggctcaagattcttcaccggatgaagagaccatcaaggactcccaagctaagaacttgccatctggaccgaaacagcccgatattgttgacgacgatgcaacccagtctgacaacggggatatggcagagccagtggtagacttgacgccagtagcagagcccgaacttccagcagtgcgttcaaggcggtcagctcgttcgggccatcctgttgagcccccaggtctagctccagctacatccattattccggaaacgagtcctacacgagttagaatggaagccggtgtggtagaggagccaacccatcagccggctgccccagaactggagccggccttgcctcactcgacccccccggcgcccaatacaagatccagaagggcaattcttgagcctcgtcacccttcaagctcagacctcacctccatcgcctcaacccccagtatctacacagactctactagagcatctgtgtctgagcgctcgcctctcgaggcttcaatggctggcaacttctcagcggtttctacgagactgaaccggagacaagcccgtgagagagttgcaaagccgaaaggctcaagagagagtctgaggcaatctgtaaggttgcagagcaggaggggctcaggttcaacagacgagctcgctctgcccctgccgacaacgccggcttttgaggatagcttgggcgtctcccgtctcaatattgcttcggcatctcggtctacttttcgagctgcctgcgtgagcatcaaatcgcccttcggccagcctacttcgggattgttcagcaatatggcttttgccatttcttttcaatcgaagaagccaggtgaaaccaatgatcagtacaagaagcgcatggacgattcaaccacccttcagaagcgtattgcgcaagctgggggcagggtgcttccaaatggattcgatgagctctttgaggtttcacccgggagatcactcacgtcgaccccggtcgctagtcctgggaagggccagacgtcggctgagatccaactcactcccgctgggtatgccaccggatttacggcgttgattgctgatgggcactctcgcaaggtgaagtacatgcaggctttggcgttggggctgccgtgtattgctccgcgttgggtgacgatgtgtctagacaggggggagctggtggactggtcgccttttctcttgtgcgctggacagtcggcttttttggataatgccatcaggtcgaggagtttggctccttatgacgccgcgacggctaggttggcggatgtggttgcccagcgcccgaagctgctgcaggggagcaggatgctggccgtggtgaagaagtcggtccagtcgaagaagatgccgtatgtgtttctggcgcaggtgctgggggtttcgttgacgagggtgtatactgttgacgaggccagggtggcggtgaaggctgcggaggaggcggggcaggtgtttgactgggtttatgttgatgggaagtcggtcgagcaggcgctgttttcggcccctttttcgacggggcagaagaagaagaggaagagggggtcgatggcggcgccggaggtggtgacgggggatggtggtgagccgccgttgaagaggattaggacgctggatgatgagttggtgattcagagtttgattttggggaggttgattgaggagggggaaatggaacagtgagtgtgtgtgtgttgggggggggggggatatccagtttacttttggtttttttatttggtttttatctgtcatgtatgattagcgggtatggcgatgggagttgggggggatatgagatatcacgcctgtagttttgtaggaacgggatgatgggtataggacaagagaatttatcagatggggattagacggagaatggaagggggagggatggattttatatagcataatgtgaggatacagcgtatagtttatagcagatcactgcgttttgaacagggagttagtcaagaggggaaaatgaacgtcgtgaattcatattacaaaacttttaccctacactttccttgcgatacaaatcccaacccattgacaaaggaaataactccccctccgccgaaaagtaagttaacgaacgtctctagttagtccaacctgtctctcactttttttctgctatccagtcctttttttttttctttttttttttttgcaggtcaatcagttacacggagcatcacacctcccgatatgatccttgtcgggattcagacaagtccctccgcaactgcagagcagctcgatcttgttgcccgcggtgtcggtcaggctgcaggagctgccgccgcctgcgccggcgacgggggcttgtctctttttgttgttgaagccgcgggggtggagcttgttgttgttgttaccaaaaccggaaaagagtgatctgaaaaaggaggaatgggaggaggagccgtcatcggagttggcgtaggggttggagttgggggagatgttggaggtgagggacaaggtggtggtggagttgtcgggggggacgcagacgtagagggcttggatggggtcggttttggtcttgccgtcgaggcagttttctttggaggcggagcagtaggattttactatgtctgcttcggcgaagcctgggagatggggtgttagtgagggggcagggacagggtggaaagtgggcggggtggatgaaggagtgagaatgtttaaagaagtcgagggggaaatcgtgcgtctttgttttccctgactgggctgacctaggttttgagagaaggaaagagacctaccttgatgatccctcaagatatacccacaatacgtaaaccccttcccacaaaccgccccttgaccagtggcggcaccgctgccgccggaggccgcaggagcagatgtaggtgccgaagtagaagaccacaccgttcctgtcgccgccggaggcgcggggatgctcgaccacggcaccgtaacagacgtcgtcgaagtcggcgagggcaaaggaagaggagtattatcctgtgcccgagacaaagaagcgaacagcagtaagacgagtgacaacatcttggtcatggtggctggccttgttgaatggggtgatgacagtaaagatgaaagagacagtgggagtggttcatgaacaggcagtataagaaagaaccgaaaaagaaaaatcgacaagtcctcgcgtggtttgaggtgtttatactgggtttgtaactcttgatcaacttgtcacccgtaatcgatcttgaaaaaggtcgatggcctcttcgatcttgtatcatcgtgcaggcgtgtctcccctcaacagtccaacatcggcaagcatatttgcaagttgaccttaacccaacacttcgccactatcaaccccccctttcccccagcacatctactcgaatcctccgcattgggagagatgtaaagtgttattacgtagtatcctgtcgcagtatacccttggcgtgctcccccctacgcaagcaacccccctctcaaccactgtgatagcgtgatagcaacatacccctcgggagccccggtgagagtctacaaagtcccccctgagtgtacaaacatcagcctcgagattgattccgacaaattcttctcgcaaagggtacctgagtcggccttatccgatcactcacctgagaagaacaatgataacggagaataagtaagacaaggactcgagtggtgtaacttggtaacaatacacacgggggatagcatctgagctggacaagtaccaatgaggggaccgagtcaggtaacctgtcatagacgtgcagacaagttggacaggcaggcccgcgagtccaatccgtctcacctgtagctccggttttgtgagctgtatcccccttgggctgagcttgatggagtgatatgtgatggctcatcggcactcggtgaaggcaagccgtctcgatatgttgttgtttggcactttgtctgttggaaccttgaataaccgatgaacacttttgtgattggattatgaccatgttttatgttttgctctgtctgatacaatatcggatggaagccagagtatctctgccaaggctgaagagtgctataccaccacgaaggaccaaacaaatgacaatacaatacaataagtaatagtaatagtataaatagtaagtaaaaaagccccaattgctccttttcccgatgatttgcgctcccccagcccccagtccattctttaccttacccgaagtctaccgaacattgtaacctcaaaaaatgcatctcccggtccatacttcctcccctgactggccctcattggcacaaatgcaaaccccatcaatttgctccccttttccaacacgtgttcgacactctcggctcttctctgaccaaaaccacagggaatcaaaccgaaaaaaaaagcctacccccagaaatgcatttctctaaaaaaaaaaaaaaaaaaaaaaaaaaaagggcctttgaccaaggctcggtttgctgacaatgacgccgctgaaaaggtctggtcgaaaaagccagacctatgtgataaatgtgtgtgatgtgaaatgtgaaaatgccgattcgagtcgatataaaaaagggtattgtttcttcttcttcaatgatggctggtcttgcatcgtggcgttggtcatttggcgttttcagctttgtttctgctgatgatcgcctggagagcactcaaggagcagatagtgtacaatacacgcctgttcatgtgtttagacggactggtagagcagcaatggctccccgacattgctgatttcaggaatggtgcacttcagatcaaaagctttggagagcacaatcttgaagatctgcaaacgaagagggtcagacatgatacaactcaaaaaggccaaagagcacaagggacgggtataccttttgaacgttgatactgtgacttgtgctgctaaagatcaatgcagcacgcatggcctttgcaaaacgacgggcctagcacacgttggtcagtcgggagcaacaatatgtaatctaccagaagcaggtcatacctgagtcgatatctcctcctgctcttcgcgtgacaagttcacaaagtggtcgtactttgtgcccacgagaacagggatggccgtcttgttgaagccgcgtccctggcgataccactccttgatgctgttcaacgtgctcttgcgagtcaaatcaaacatgaacaggatggccacggcatcattgcacaccagtggcagcatgttgacaaattcgcgctgaccacccaaatcccagatgctgaaggtaatctcggtgtttcggatgctgattgtcttttccataaagttgacacccagagtctggatgtagtcctcgtcccaggacccctcgacgtatttgaccatgagacttgtcttgccaatctgggcatcgccaaccatgccaaccttgatgaccacgtggttgcggccattattctgcacatcaccggccaccccttgtccattgctgctgctggcagttggcgcttgtcccgagaggccggatgggggtcgagaaagggaaggttgctgcaatggctggtttccgtaccgagcggtcgagtcgggatcggtgttgtcattcacatggggcgagttggcaattccgagaccatgttgttcgccagaggatgactgagcatggtgtcgatcgtggaagccattgagatctgaggcgccatagtcgtttgtaggctgaactgtgtcctccattccgaccatagagtcatcctgcagctcgactggggcttggttgtaggtaggggtgggagtcagagcagagtctgagtaagggtgagcggcagcatgatcttgctccatggtgttggggtcggcgatggggaattgagctggggatccctcgggctggttggagggttcctggtagaaggcggtaggggggttcatgattagtcgcgctgtggcggtcggtagtcggtcgagcgcttagactagacggacaagccctagagtatagcagtcgatcggggcggatgtcgttgaagaagacaaatgtggcggtcggtggtcggcagttggtagtccaatgctaggccagcgacgagttcatggagacgcaaaaaacagagagctgagggaagcgtggtagaggtaagctgggtagactagcttggtcggggatgctatagaaccaaaaccaaagaagccagggaccgtgttcgtctcaactctcaaacagcagtcacagtcggtggtggaagagtgggaagatgggcgttcgcagcgaagcaaccagggcaggatgcaggtcgcaagtacgtgcgggcgggtggacggtgcggtgctgcagtgcggagccggatcggatcgtcaggctaggtatcgtggaacccaggctgtcggcgcgcctggccaaggaagcagacgacaggcagaaagtcaacctggaggaggaggaacagatagatgcccactgatgtgaatggaggttgctggatcgtggggaaatgtgggaatgagtgcagtagccggtaccttaactgccttgactcctgcaggacagagcaaggggaggttcagaggggaaccaaatcgaaactcacccactgtggtgcaaaaggccaagcgcgcgaactgacggttacccaccacggccctgttccgactcccgatccccgactcgactgtccactcagctagcgttttcaattaattgagcccagcacacgtcactgcttctggccaggaccaggacgcgctgctcgacacgcgacgcgatttgacgctttctttcttttctttctctcttagagagtcctatgtagtgatgatcatgattgccttttcaggggagatgtccccaatgtaaacaatcaacaaaaccactccaatagagcagcaaccattgaaacgctttgccttgctttgttatcaaatctccaggccgcctccttaaacgcggggtcaaggttcagtttgtttggttcccctcatcggcccagagcattggatggaggatctagccacacgccttcttgctgcatatctgcctgccaagcgcctttcaacacaggtaccttaactttgacatgaggtaggcaggtctagaaaggtataaatgaggctccgattccatcatctcttgacctcaaccgccatttgctctaaaataagcgccggcataagcgcacctgaacagaggcctactccctgaatggcatgaccttcaaccaaaacatacttcaagactgaaacctttcactccaatttacctgaccttgaccttgtcgcattcaattcaaaaaaccaagaagcatcaagtcgcgtgttgaagatgacctcatctggagattccaactccaccatcagcagacagagctccgcgcttattatgtaagacaagctcggtagctcggttccctgctgctgcgtttgactggccgcccggcagctggccggcaaccaccggcccaatcaccgggactggcttccgacaatcgcagtggtactccgtcccgtctctttatcggtaggtagcgtcattcgatttatctctgggttctcgacaacctcactcacccttcgcttcattccagctgtacaactcaaaatggcctccattgcccggtacctaagggctgctcgcccatcagccttcgctgccgtgaggagctctgcttcccgcaccgttgctgcccgcccattttccgtcaccgcatccagtgagagaacccctccaaaacctcggccctgagtttgcgacgggccttactaaccaccagaccccctctagacgagatcaggaaatacaccaaggagcacgaatggattgacctcgccgccgacaagaagaccggcgtcatcggcatcagcgagtacgccgccaaggccctcggtgacctcgtctacgtcgagctcccagaggagggcaggaccgtcaacaagggcgacgctatcggtgccgtcgagtcggtcaagagtgccgccgacatcaacgcccccgtgagctgcaagatcacccagatcaatctcgtgctcgaggagaagcctggcaacctcaaccaggtccctgaggatgactcccacggcggcggctggatcgccaaggtccaggttgacgagcagggcctccaggactttgagaccctgatggactctgagcagtacaacgagtttactgccaacgaggaccactaagcagagacatgacctgaagaaggggagagagagacgctgagaggggcgggaggcctggcagcgaggtgctctctcaggggtgtacggtaaattggttttttttcaaattccggacagttcaacctgataaatacacaaggggcccaaagaaaggatctgtaccatacgggacatgggaaataccggggcaaaagggtgttttgatttttatgggtgcgcatcttgactttgatgacaagaggattcacgacagagaagagtcagcattgcaatggcgcaaacattgtgccatttcagatacccgtcgagggccaggcagagagcactcaacggctgattatagaaaccaagcatgatccgacagttggagtggaaacaccgtgagatttatcattgtgaagcataagcaagccctgtcgctattctattttttgatccgcccaaaaacacaacccatcacgacgagcacctaagcatcgctgaccttgagcgcacccggcgccgattcacgaagcttgttgatagcatcaagaatctcctgagcaccctccctggccagcttctcagccaagctcttcccaagagcctcggcctcctccaaattcgcaatcttctctgtcctctccccatccacagcctttttgccatccaggctgacaaccgcaaccttcaacctcagcttcttctccccctcatcctcaacccacttcgtctcaaccccaatcggcaccgagcacccgccctccaacgtcctcatcacacttctctccgcaaatgccgccatcatagtatcctcatccaccgcagctttgatcaactcggcaatcttctcatccccctccctaatctccaaccccaacgccccctggcccacagcatgcaacaacccccctccctccgtcgagctctccagatactgcccaatcctctcatcataccccaacctcaacaaccccgccgccgccaaaataatagcatcataccccccattctcatcatcacactttgccaacctagtatcaatgttccccctcacatccctaaaaaccaaccccttatagctcctcttgagctgcgccgccctcctcacactgctagtccccaccaccgacccctcaggcaggtccttcagcgccttatattcccccccctgacgcctcggaaaaacaaccacatccctcgcatcctccctctgcgtaaccgccccgagaacacacccctccggcaagctcgtcggcatgtccttgagcgagtgcacaataacatccacctccttgttcaccagcttcgcctccaattcactagtccacaaacccttccccagcgacggcaaaggggtagtcttgtccctgtcccccatggtagccatggagtgaacctcaaacttgaccgacggaccggccgcctttgagagcgcggcgatgacgaggtcggtctgggccagcgcgagggccgagcggcgggtgccgatcttgacggtgtattcttcggtcattgttgtatcgtttctcgttactatcgtgttgctgctggctttgtgaaattcgaaaaaaggaatttgactttcgaggaccctggatttttctcgtgtttcaatcccgctcaaagacgacagttatactttctcgacaaaaccggcgcaatgggtgaatgcagatgcaagcaaattaaccagcagcaggagacgaagcgtccgatgaatcacaccctgcttcggccgagggacaagttgacttgcaggaagttttggagtcgctacagcggggtagatttgtcaattgttgacaggagtccgctgtttgaaaccgctgcgggggtggggtcattgcctcatagtgccccctcaacaccaagcaagacaccttcctctcacccagacaagcatcacaaaaggcgtcacccaaccccagaagcaaaagatatctgtaatcacaaacactacaattctatccctactcgtccattgctaggatttcattagcgattaccacatcatccgtctcatccagccaaagcttgtctctaggattcatcatcatcatccaacctctttcctcccccattccccttttttccacgactttacttcccatttccattctccttccgattactcccccgactgctcccccgaatagtcttcctatcatcctccaaaaagtgctccaacaactgatgcgccctctggcccactttggcatcctccgccagcaaatgctccggcgccctcctcttcccaggggcaggagaagcaaccctctcatcctccccaatcacatgctccttcaccctcaactgatcagcccaactctccataacccgcacatcatgccccatctcgtgccccctcactggagaaggcgcaggactcttgacctgaagctcggcacgtaaatcatgctgttgatactcccgccccgggctcggtgtcaaaaccttccgatcctgactcagatcatgctcaacattcagcctctgcagctccggcacaggcaccttctcttcaagatgaatcccatgagcaaaagccctcgaagtcggagtcggcacccagctgtctctggaaatggtgtgctccctggccttgtgaaccggtgaatcaaccctctggtcccctccaagcccatgctccttcagatccaaccccttatcaccaaccttgacatcctccttcaaaccatgctctccctctaccctctcaacctcggccgcctcctccaaatcaacatcaacaatctcatcctccctcaaactatgccctctcggcctctcctcccgtaccccaaccttagggtcaagaccaaagctgtgctcccgagcccgagcagcaatctcctgaaccctgatatcagcctcaatgagatgatccctcggatcaataaccaactgcacaaccttcggatcctgcccaagagaatgcctctggacactctccctccgatccggcacccgaatgtcaatactaagactgtgattcctcgacgagtgattactatgaggaacctcaacatcagcactgatgccatgatccgtcacagtagccctcctcaacctcgccggcgtccccggttcagaaacaaacacctccccgggctgaatctgcaccaccccccggttaggtgagttcctgtccatccccgccaaaatattcgtagcctgttgaaccagctgtgtcgcctgctcgagcccctcttccaccggcaaaacaatcacctttttcttctccccacaattaccacagacagcatgannnnnnnnnnnnnnnnnnnnnnnnnnnnnnnnnnnnnnnnnnnnnnnnnnnnnnnnnnnnnnnnnnnnnnnnnnnnnnnnnnnnnnnnnnnnnnnnnnnnnnnnnnnnnnnnnnnnnnnnnnnnnnnnnnnnnnnnnnnnnnnnnnnnnnagggggtcgtcattgtgggtggcgcggttgaggcggtagttttttttgccgaactggtcaaagccgatgaagcaggagcgggggcggaggccgccttgcctggttcgcagaggccggcttgccaggtgttggttgggtggcggtggatgggggtgcggcagtggtgagccatggtggttaagactgattgctaaaggaaacgtttgtcttgggaattagaaaaagaaagatttggtcgtaaagaactgtggggggttaatctctgtaatgataccgtgggatggggaggttaggggtggatgtgatgatgatgatgatgatgatgatggtgatggtggtgagacgactgtggtggttttgggagaacaagaagagaggagatggcgtccattgctggggaattttggttgtctgttggactgtgctgggttccttcctagctacctagctgggaaagagtggtgaggtgatgaagggctcttgctgatgatatctgtcggtctgtgagttccacggtgccgacggtgaggtcaatgcggatgtggcaggtgcttgtcgaagtgatggctccgccttgcaagagcctcctaccttgttctgacgtctttctttttgatagtatcctcagcacctgcagggaccgattggttgcttccagactgctggtaacttcaaagttgtcagggaagttgcgggtggatcaaggtataagaaagcaggagtctgatattgaacgctggctatgctattgaaagtttgagctgccttgagaaggcggcttgtcattaagcttctgagcttgctattctcaccatcagcccaagtccaatatcccaaaatgatccaacttacacttcaggtcgagtcatcatctctcaccactgctctcactgttgatcttgcccgaggccttcttcaattcactctcccgggcgtaccccgccaatacttcatccgcatagtcgtctggcttcaaaaggaccaaagtgacaggcaggagtattgcaagttctccaagccgcctggacgaggagcgagcgggtccgtcaaggtaagcattgggatctcaccggcttgaagaatcattcgggcacacacgacatatcgtcatcttcggcactagtggatctatgagcacatcttctctgaacaaaaggatgagacagttgagctgggatgggccgcctgcaagccatgtaccagcgcgagcgagcgacagaagcttgtgtccacatcgttggtgtgttgggaaacttcagatgaaagctatgccagagcaaaagcagcgtctcccctcgccagcagctcgccaattgagtgaccaattgaatgcccaaccagagggtcgccttcaaccctcccttgcaatcatctgcggtggcccaaaccttccaatggattctgatctatgactatttcccaactgcacctcaggaataatgttcatggaggcttgacattgaacgacgaaccagccaagaccctaaggccgtctcggggaaagctccaagcggggacagtggatcccggcactgtttgacgtctttatacaggggggttcattgctggccatggtggagctggcaattgaggttctcgatgataggtacttgacatctactcaagagaagctcattgttggtagatagctaattggtctgcgaggcgatgtgtctgatagactgccaagtaactttccttgtctaatagccgtgattttatgtgtaccagctaggttgtatgtttctgacctgctacacttgctcggtgacaagctttgaaacccttcaactatctatcctatgaaatgcaccatcatgtcttgagccccaagttcccaacagccacatctggagaggcttgcttgttatagcctgtcgttgttttcctttaaaggcctgccaagcagcatggttgggtggggctctctgaaccccgcgataagtaacttgaccccaccaccaatcaagcatgacgcctcctcctccataacatcgaagctgcctaatcaagactttcccaagcttcctgtctgtaaagcttccattgcatgggaagtggcgctctaaaatttaaccttgattgtgaccgcctcagttttgtcataaagctcgccttcgtcttttttcctcacagatttgtcagttcctggcctctctctcttcttcctcctcccaccacagctaactccgagaagccatctcgcatcaatactgcatcacaaccgccatactatagcaagtcaccatggcgagcacaatccccacgaacccgagccctcagacgctcaatattcttctccagaagatcagtgatcccgacccagatttccggttcatggcactgaacgacatcctgaccgttttcaacattgcgcggaccgactttttgacccacgactataacacatcggcgcggacagtcgacgctatcgtgaaagcactggatgataccaatggggaggtccagggccaggccatcaaatgtatcggccctatggtgcagaaaatcacagaccagctctacattcccatgatggagaagctggcaaccctgaagctcaaaaactcacaggacacctcgatcccatctcttgccatgcgggccatggtggccgccctcccccgccctgtacctggcgtgtccaacaaccaggtgctcgaagcctattcggccatcagtaaggctttgatcccaaggctcattggccgcagtggttctacgccggggctgttggccaccgaaaacgaatcttccgactacgttgacgttctgatcgaggttgtcaagtctttcggacccatgcttcagatttacgaaattgaagttattcacaactcgatcgttaccctcatggagaatgaaaagggcaattctgtgcttaagaagcgggcggtggtggccatttctatgctcgcccactacctagcggacgaccatctagcacaatttatcaagcgcgccattcatgttctcaaccatcctagcctgacgggagtcacccgtcgtctctacatcacggttctcggctccatggctcgctcagtacctcagcggctcgggaaacaccttccagaactggcaccaatccttcttcgtgctttgagtgaggaagaattggaggcgcagcttgaggagatcagcgagggcggggaagcgagcttggagttcagcgaagttcgcgaggctgcgttggtagctctagaagcctttctcgccagttgtcccaaccagatgcgcccctataccgacgaatccattgaggcttgcctccgctatctcagattcgaccccaactatgcgctagacgatgacgaagatatggaggatgaagaagaggaggacggtgggttcgatgacgatgacgagatcgaggccgatggcggtttcgacgatgacgacgatgccagttggaagactagaaggtgtgccgcaaaggcgttgcatacgttgatctcaactcgtagcagcggcgatctgcttgacagcggagtgctctacaccaaggtggcgccagctctagtgaagagattcgacgagcgcgaagagaacgtacgactggaagtcctctccgccatggctctgctcattcgcaagaccggggagggcgtcatccctgagttctcccttgaaagccccagcgaattcgttcatcagcagcctccgagcaggaaacggagacggcagagcagtgcaggcggggcttcagcgttggctaacatgatcacacccgcaagcctcgccggaaccgggcttgcctcgccaacattggagaaggtgccagcaacaggacctcgtgccgatcttgctgctctcaccccttccatcatcaagtcactcgccaagctgctcaaaggaaagcttatccccaccaaacaggcgtctatcaacctcctcgacgatatcatcactgtgcagagaggtggtcttgggcagtatttcgaccaaatctttggtcctatcattgaggctatcaagccctccagcgttgcctctacttcggcgtcgctcacttctgctggaggaagtgcttccgccactgcaaccacactgagaatcgctgctttgcgtctcaccagcgacattgtgaagaatcactcgtcggctgtgcttcagccccatctccccagcctagtcacgggcctggtgtctgtggctcacgaccgcttctacaagatctccagtgaggctatccagacggccgaggaagtggtgaaagccattacaccccctcgctcccgactgaccgcgcaaaagttcaagggtgaacttcaaaagctgtacgacgtcatcatcgaccggatcagagacaatgacgccgatgccgaggttcgtcaaaaggccatccacgccctcgggactcttttggctagaaccacagggaacgaaggctctggtttgctatcggaggacaagcgcaaggctgccttgggattcttgctcgagcgcttgagaaatgagaccaccaggatagctgcggtccgagccatcgatactgtggccgcgtactcgcttggttctgttcagcttgagccggaatggatccgtcaggtcgcccatgaacttgctgcccagctaagaaaagcgaaccgggccctgcgtggctcgagcatcgtcgctctgaagcatctcatcctttccccctcgaccaagggcactcttgacccagattccgctcaggccatcgttaatgcgcttatccctgtcattaccagcaacgatgctcagcttctggcccctggtcttctcatcctcgcgcacctgacccaagagatgccccaggttgttatcaccccacagcttgtgaccgtcatctgcggcctggtcaagacaacagtcccaggcacggtgctcgactccttgttgatcctggtgaccaacgctggtcagactggccaaggcaagtccttgatgcaagggctgcttagggacgttggtgtcgctggtgacccttctgtggtcggcaaggtcattggcactctgctcgtggccagcggggactcagccggtgtccagctcgataactttgtgagcgaggtgaagaataacacccaggaccaagccagggccagcttggctcttgctgtgatcggtgaggcaggattgagacttggtgcgagcttcccggtgccgccggaacttttcctgaaccagttcagcaacgagtatgacaaggtctcgttggctgccgctgtcgcacttggacgagctggtgctgggaacgtctctgtgtatcttcccgtcatcctgcaggcgatggcaaagaagggcaacactcagtacctactgctccaatctatcaaggaaatcctgcagcaagcggcgctgtcctcaacggatatcagccggtactccggcaccatttgggaccatattttggccttgacggatgccgaggacaacaaggcagtctgcgccgaatgcgcgggtcgcatggttatcattgaccccaagacgtatatgccgaagcttgaggttcgtcagagctctcttgtttgtttgtcacatatcagttgatcatgctaacatttcgaaactaggctctactcaaggacaagtcgcctgtgctgagggccattgccgtccaggctttgagatacacactgccagacgataatgaggcctttgacgcggtccttagatcgtcgctctttgacatgctcaagactgtcctcgaagatcccgagttggagattcgccgtcatgccctgtctaccctcaactctgccgcccacaacaagcccgagctgatcatgggccgtttcaaccagttgattccttatgtcatgaaggagacggtcatcaaccctgacctcatcagggaggtgaccctgggcccttacaagcacaagatcgacgacggcttggaggtccgcaaggtagcatacgagacgttgtatgcgctcatggagacggccttctcacggatttctatcattgatctctacgaccgcatcattgccggtctctctgacgagcacgatatccgtgcgctctgcaacctcatagtgtccaagcttgtctatctcgactcggctgagacgatccgccggttggatcctattgccgcggcctttagggctacgctctcgactaagctcaagaacacggcggtcaagcaggagattgagaagcaggccgaggccaaccgggcggtgctccgcgtgactttgctgcttggtgacaagctcaagtcggagctggcgacggcgggcggtgcggcgactggcgggcatgaggtgtggactagctattgggattgggtcaacaaggacttcaatgaacagctcaaggctgtgagggaggagattaagagtttgtcttggaatactattagtgcttcgtcttaggtggagcgtgtaggggggctggggcttggattttggctttggtcgggagaggaggtggtggcggtggagccggtgagagaggcactaggggaggtgacgacatcttgtgaagcaatgcgaagtagcaagggagataatgagacgggaactagagccgcgaacaagatggaaattggaggtttattcattgagacggagactagaggagctgagaggacgggagcgggcggagaagccgttgagaacagaggagccagcagaggggcaagtgaaaaggaacccacggacgacgtggagaaacatgaagagggtagataaggagtggaggaggaaagtttgttgagaggttgagggggatggggtggaaaggaggaaaatagagtggtgagcggtttgtatgggtgtttttaagcgattattggggaggctttgagatgtctgttttggtggttttgtgtatcgtcactttgggggtggggggggggggttagccattgtaaagttttgtgagtgtgcatggatattgttgataggaattaagaaaagagcgattgcgtatactggtggttgacatgccgtgaacgtaaaagtggcactgcctgcaggttggttattcaagacatgctgccattgtttaaccatgcttctagcattgtcctcggttcctgaaatgttctgaccatgatccacacgacaaaactggagttggtcataaccatgatggaaatctaatagtagtctattctgctaactctaattttggttctgctttgacccataagaaattcccttcttttttcctttttttttccctttatttgaacccccaagcccgagaattcactccagctcaatagtcccaggaggcttgctggtaatatcatacgtaaccctagcaacaccatccacctcgttgacaatcctcctcgcaatcttcttgagaagatcaaacttgaactcatacggttcagccgtcatgaagtttgtggtggtaaccgcacggaggatgatgatgtacccatacacacgagcgtcacccatcacaccaaccgccctgttggtgtcaagaccagcgtaagcctgggacatctcattgtagatacccgcctcacggatcatgctgataaagatgtgatcagccttgcgggcgatagccacacgctcgggggtgacctcgccaatgattctgatggcgataccgggaccggggaaagggtggcgcatgacgagatcctcgtggatgccgagttgacggccaaactcacggacttcgtccttgaacagctcgcgcaggggttcgatgagcttgaggccttggccgttcatcatgcgggcggggagaccgccgacgttgtggtgggtcttgatggtggcggagggacccttgaagctgagggactcgatgacgtcggggtagagggtgccctggaggaagtactcgaccttgccggcgttgggggtgttctcggcggccttttcgattctgatggcctcctcctcgaagaggtcgatgaaggtgctgccgatgaccttgcgcttggcctcgggctcggtgaggcccttgaggcggctgaggaagaggtcggcgccgtcgatgacggtgaggttgatgccgaggtgcttctcgagtgtctcctttacttgctggcactcgttaagacgcatgacaccgttgtcgacgaggacggcgtggaatctgtcacctatgtaatgtgtcagtggactgtgcaggtcaactttgaaaatcaaacaacttaccaatagcctcagtcatgagacgggcagcgactgtactgtcgacaccaccggaaacggcaccaatgacctgggccttggggccaacgagcttgcgaatgcgctgaatctcgtgctggatgaagtcactcatgacccagtgttgtctggcaccgcagatatcgacggcgaagttcttgaaaagctcaacaccgcggggagtgtgctcgacctcggggtggaactggacgccgaagacgggcttggtctcgtgggcaatgccggcaaactcagagttaggagtgctggcaaggatggtgaagccctcgggaagcttgaccagcttgtcgaagtggctcatgtagactgtttgaattcgagtcaatgaaaacgaaccgagtatatttggaagggtagtacgtaccatgcatctcatcaccaaggccttggaagagcttgttgacgtggtcagcaccctcaaccttcttgatggtgacatcctttgaatcatcaagtcagcacgcttatttttgcaaaacagtcaaccaagtctaaacctaccgcatgaccgtattccctagcctcaccagcggcaacgttggccgagttggcccgccaagcgatctcctggcaaccatagcagatgccaagaatggggacacccaggtcgaagacggcggggtcggcgtctttgatactcaagtcagttcatgacatcctgcgccttgatcaccccctgaatttgggatgagtaaactcacgaggagcagcctcatcatagactgaggcgggacctggagttggaaatggtggttagcgattatgtctcaacctcaaactcaagatcagcctatgataaggggtatgataacataccaccactgaggatgacaccctttggcttccatgtcaaatcggcaatcttggtggtgcatgggagcatctcagcatagatgttaagagatctgagacatcttaggatcaagtggctggtctgggagccaaagtccaacaggaggatggtctacgaaaaaaagaggtcatgagtgagtgagtggttcatcatggtggtggtgagctgataagaagtttgcgatgcgcccagcgcatggaggggtaatttttctgaaaagatcaaaacacttcaactcacatcgaaggtctggttgggggcctcggcctcggcggaagtagcagcagccattgtgtctgaataatcaaaagggggtatctcttgcttgctgaaatccgatggagcaagcgattgtgaaggacagccgttttattaacctatgattcacaacagccagggcaaaaaaataaaattttccactcgatggaggggcgagatcggtaacacgctcccccactctgcagcttggaggggtgaccctccaagaaatccccgtctttaatagagggtggtccgtgtgtaagtgcttatcagtgaaggagactttcctatttgggcagtactttaatactcacacgccattcttgagatgagaagacaagatgtgacaataaactttcccatgaaatatcatcctagtcattgaaatgcggaataggtgtttctgaccatcttttggtaacattgttgcatagagaaaaccaagagtcatggctgcagggtcaacgacaccaaccgtggtgccccaaagtaccggtacttactccacacccttcagcccagagctcaagccacagcaagcgggtcccgaagttcaatcaagcaaatcgactccactgcgcaagccgtcgttgtccctgaacatgcatcgccatttctcaagctccttgacagctccatatcaacaacatccccagccataaccacacccgccattatccacgcgcatatccatccatacctacttgaatcatacacatcgcttggggcatcagcaacaaaaaaccacaacaatgtcccaaccacgaccccctcccacatcatcaggcaacccatccgcccctccccaaaaagaaccctcctcctcccacgccactggcctccgctacccctccaacggtaaaaccatctaccaccgccacctctcccgcagccgaaccgccgagctctcccaagcctccttcgcctacctcttctccgaaatggtcacctacgcccaaaggcgagtaaccgggatccaagacctcgagaaacggtaccattccccctttcctcccttttcccctcctccatactaaccttttcattaccccagcctcaacacccaaggccaccctctaggcctaaaactcctcgacctcctcctcatccgcgaacccccccgctcccaatcccgccccctcaacatcatcaccctcctccacttcatcaagatcaacctctggcaacacctctttggccggcaagccgaccgcctcgaaaaatcctccgatcccgacgcgccagacgagtacatgattattgacaacgaacccctcgtcaacgcttacatctctgtcccaaaggaaatgtcacagctcaactgcgcggcgtttgtggccggcatcatcgagggggtgtgtgacggggcggtttttcctgcgagggtcacggcccatagcgtggggagtaaggaggagggggagatgtggccggggaagacggtgtttttggtcaagttccagcccgaggtgttggagcgggaggcgttgattggtgggaagggttaggaatgagaagaattgctgcggtttgggtggtctaaaggtggtggaatggagtgggtttgcatatgttatggcgtttatggagttgggcaagcaaagtgtttctaatggtaaggcaagcgatttgtttacagatgttatgggtgtgaccagaatagcagctattgcacttggttaatattgagcagttgaggatcaagaaaaaagatagagtaaacgagcgctcataaagagggctgtatcaattggttatggactatgtgtatcaatctgaaacctgatgggtataatttcctgctccgatatgcgccccaaacacctatccgataatccacaggaacccccattttgtccgagctgatgcaacctgatgaccctgtgaaaccaagccaaacgccaaagcaatgctcttcagtctgaaattgccccgaatgccgaatgtcgttaccatcccagccatcagtgaccacacgcgcgagcgagcgcaaccagagctagctcagaccagcaatcagcgcggcaagccgcggtaccccgaccccggagcgcgatgaccagggcgtctgcgcggggcagcattcccacggccagcagcacccccggccgcagcagccccagcaccagacgaagtcccaggccggctgttgttagcccacggaccctggtgagcattcccacccccagggcccttcgacatgagctcctccaaccccaagtccctccaagccggctccttcaccttctgagtcgccttttgaattccgaaagcggcgtgctgatcggggacgacatcgtcctcgtcctcgggattgacaggctggaggtgaggcgggacgtaaatgtcgtcgttggggagtttggagtccttgcggaactcttcgaggaggtcggcgtggaaggagtggtggaaatggacgtaggagtagtgggcgtctttattctgaaccaccaaaaacatcagttatgagctataatagaaggggaaggttgggggggggggggcaaataccatgctggcgtgtccgatccagagtctagcaatcgcccgactagtctcggtggcctcaacctcgaggttcttcacctcgagcacctccgtgatatccggcaaagaaactatctggctggatgtgcggctgtcgagctcccaggaactggtgctcgtcgcgtacgaggcgtcgctgtcggtatccgggccctcgagctcagaggttatatccgcttcgttattgtcgtggttgcggtcggcgtcacgggcttcggcgtggttgcggatccagtcgagcaaaagatcaccctctgtctcaggagtgctgtctagaccgagaccgtcagagtcgccgacggaggcgttgtcgtcgaggatttgatcagtgtgatcggtctgggcgggcagggcaagttgattgctgtgttcgtcctcgtaagaaggaagattcgggtgctggatgtgagagggggggggaagcgggggagaagaagatccggcagcgattgggttggaaggtcggtcgaggttggcagggtcgacatggaggagatcaacttcgtcctctgtgtcttcccaaatggtctcgaggtcccggccgccttgattcatcttcgcactgtgaagcctgtgggcttggtatgatccgtgcgttgatgtggcgcttcgctagcgtggtggaagagagagaagagggacgtgcgttgtggagctgcagaagtagcgagacttctgttgctgggtggtctgtgcttgagaaccttgatggtcagagcaagttcacgacggcttgaagcgtacaagttcagcaaggttgcacttctaaaagaggttgtgttcaggaaatcatcgcagcattcgaggtttgtgattgatttactgcaacttggacctcaaacgagcaaaatgatgcagcgatccgcgctcgaacaagttactgctggcccttcttaattctcgacagacttacaggtaggatgggtctcattttatgtggttagccttggtctgtaagtagatttgggtacagggccaaactgtgtgtaaagaaagggagtaacaacatggtcacgatttgtgttggctacacgtcgaggaacaagaacatataatgagatgaatgccagatctttcttatttgtgagcgaaaactatgctaccaaaacttcttcactatgagacttagatccagccaactcaatttctcctttatcggtcagcttcatctataaaagaccagtggtgaccaccacgttttccttgccatggacgtcccgaaatctgcacccgatctaagcccagtgtctaatcttcaaaaccctccagtatttcacagatttgagggtcacttattgttatcagtggtaagaagcccccctcctgattaataccccgcatgagttcaaagtacctcatgggcataagcagtgttcttaaagaggatccggcatcctcgccaatgccattccaaagcccggagaggtccttggagatgcactcgttgaaaatatgatcttgggcgtattttgagaccgttgtcatatcaacgttggggacagtggtatttggcgaggtattccatatcgccaaaacacagctgttgtacagaaaacgcatcgacggcgtcaaatcggtaaaattgtataccctcccgccatcttcattgatgtagccatctatcaaaattagttaacaagttcgcgcccgagtcattaacgtggcgatggagttttccctcgcaaagtcggacgtaccttgaagcatgttgatagcctcttgacagtcatcctgcacgattggtgcagttggaaaggtgatattgccaagaaaggaaggggtgaaccccgtcacgctgtcaaagatattttttatgagttcggtcgcgttgaaacaaccacttgagactgatctgcgggcaactttggactccgagctggatctcgacgagaggttagccgcaacaatagagtcatttgccccagagggcagctccgcgtgcgaatgccagcccatgatctcccaccacgttctgacagctatgctggacggtaaaaactccgtcttcagcccaccaaagggaaaggtagtgttgtcgccaaccccccaaaccgctccagacttgttggtgttgatacaatgatcaaaaatgtagtccttggtccacgacacaactgtttgcatcggtacatccgggatcgggattgacttgttgaaggcggactggtagaggatggcgctgcacttctcgttcatgatccagatgtagtcctttgggctgttgaatgtgtagttggtggtgtactggcctgatcgttgttagctacccagataagaccttccgactggtagggacattgacctactggcaagcgtgtcaaagacactttggcagtcttcggtccactgagcaaaggcaggtttgaaacccaattcaaaacacaaaacgtttggcggaagttttggcggatcgtccctaggatggaggacagcagggggggtgaaatccgggtcccagtacatgaaggtaaaattcagagggttctccttgtcgtcgttgacccaagtcgccgcgagcgcactctccacatgacatgtgaaattcaacaagctgtcgatgagcttgtcctttttgatgatggatactttgttgggactgacgttgcagaaaaacccctcgcacagtttgggcattttgatatcgcagtgtccaggctcgagggtcacatactccgaggtgtagttgcctgtacattgttcgtgttagagaaacatgggcctgctgtgttgttgtctgacacgggcatcttgtggaaatatgtcgacataccagcatactcagcaatgagttctgtgcagtctgctgagtggaggtatgcctgttctgagcaagatctctcctccaacgaaggctgggcgaatgccaacccaaggaggggagtagggaataagagaatccacagcatcatgtcgagttgtgttgtgagtctcgagtgtggtgtgtgtttgattttgggaaatttgcgattgatttctggaatcaggctgcctttttttccagagaaggaccaaaatatatacctgagaggcaagtagggaagtcacaaatcactgatgtcaccaagtcccgctcgtatgttttgcgagatcggttgaccgcacctgccattttacttgtgtgactaacattctcgggtgcggaccatccacctcgaaaggctcgaattctccgccaacaatggcatcagctgcagcattttaccctttgcttctggcaaaaacaggtcacgccctccccccgtcctcctaccgccccatcttgttgttcaagaggctgaggcatcccacaggttgatcgtacgtcgaatagcgtcgccgagggcggtaggcaaaatccacaccataaagtaaggatcattaacgtcccggatatcatcctctccgtaagaccacccaccccaccagttgtgggcgatacacggcttgaatatgttttgctgggccatattggccaggtcagtcatgatgactcccgcccttgacgggtagttgtaaacgaggacactgcaactgccgttgttgccagtgcacagggcttaggccttgggctcgaataattccactttgtcgtctcggtttccgatttccagttcttgttaacaaccatgtgaaacagaaactaccggccctctataggtagtaggcatgtagcaatgtcgtgtattcatatagggaacacttactccaaagctgctctattgctgtctggcagtcctccttcaccggtgtcgatgtcttgtttgacaggaaacatcgcgctctgggattctttgatttgctgggcaggtcatcctcgttcgggggaggaccaacagcaacatccgggtccttctgccaggcgaaatcgatgaccttattggtagcgttccatgtctcggaaatgccgtttgtgatatggccctgctggtagaggaatgcggtaacgtccagcagaatctaggtcagattgacatgtgcgatctttgggtatattttacagttatattggacattatacgcgtcaaaacttatggtactttccgggtcggcgtgctctgcggcgtattcgtcgacttgtttgaggacttgatagcagtcgactgcgctctcaattgctttgaagatagggccacgcggcatggcctggacttcagatgatgcggccacaaccaacttcaaaaggttgaaacagaaaatgagggtgagaacaatcatgatgatgttgatgttttccttggtctctaggagatgtggatgatgatcatgtttaagaagttagctgtacacttatcaaagatctccctgttatatagccagcaataaggagagacaattttagatatgtcggaaactgttacatccgccggttccgttacaattgattcgtctcatctactgtttttatctcccgcctgacagatgtgttcgctttacaagcaaagaaacatacgtgcgtattgtagctaccattcatgattccttgtccttattggatgagaattgtagcgaaaatctcgggcatatgtgacaggaaatcaacacttactatatcaatctctagttccatatcgccaataaagctccgggtgtgggacaatctcgctgttcccagtgactcctcgttgggcccgctgacaacctcatgttgggtgtcaacaagggtttgttgcctgttttgcgaatttgattcgtaatcgcgctttgattcataaaggccagcacatgccacttttcaagccaaacgtgccacattttcatcaaatttgaaaatcttttcgaatttccatcattcggctgtggtagtcaatcgtcaaactagtgcgtggtgtgtggttagattgagccatgtctcaggaatgggatgtagcgcctgctgcagttgtgacagactttgtcgagcggtaagcaaaccaccttccattccaacctcccagcattatgccaacagtaacggctgaccaattttcattgactgcttagctgttctcaattacacctccctcttgtcattctttcagcgtcttgcatcttgctcacatggcaattgcgaaaaacatcacccgcccaacaacgtaccgctcaaccccccgccaaatctgtccgcggtgccttcctgactgccctggaaggtttgctactggcgacgaccctgtcgctaaactgggagggcctcgctgcgagtgcgtctgctagttcccgggtcggcatcaccttcggatcctacctaggcggattgtatgtcttgtctctgctgccgcccaccggccttgagcatgccggaagggttactcgctatcattcggctgcactctatgctattttcttgctcttgtccgccgtaaccagtggtgctgattccatcgctaccaatgtatcattatctctgctcatcactgcgttgctctcgccgcgcccgcaccagaaggatggcccccttgagctggacgcgacgggggaatcccagtccagcatttttggtctttggtcgtttgcctggctagacggcatgctcttcaaggcctggcgcactgggagtctccagtctcgagacgtaccggagccggctttgctcaccgctgccgacaagcttgtgattcgaaccaagctgaggaggtgagtcgtacatctaccgttattaccacgtgtaaaatgtattgtgctgacatttcccacctgagacccagtgggtcccttgttcaaagccttctacgatacttcggaccccagctggcagttcagggcgttgtggcggttgcttgggcagtcctgaccttcatgcccactttgttgttaaggtcaatccttcaatttgtcgaggggccaacagagtcctccatcgaggaagctcagggttatgtggtgctcgtatttgtcaccagtgttttggcatccgctgctgaggctcgaaccatctggcttggccagaagattgggctccggctgaagacaatcctgatcggcgaggtctatcacaaagccctgaggcggccgatggccgttggatcctcgagcggtgggcctgaagggcaaacggctgatattggcaccatcatgaacctcttcaccggcgatatcaaccaacttgctgatttgggggcaaacatgcatcaggtctgggcctcagtccccgttcaaatattcatggctgtcacgctgctctactggactctgggactcagcgcgtttgcaggaattgtggtgatgggcctgatggtgcctgtcaactcacgcatcgcccgaagtttgggtgccaaccatatgcaagtcatggctgcatcagatgccagaatccagagcactaccgagatgatgcgaagtattcgagtgatcaagctcattgcttgggactccttttttcagcaaaagataggtgaccaacgggccgccgaactcaaggtacttgatacccgttatatgctctggacgatctctgcaacaatctggtacggtctgccgttgctgattaccttttcttctttcttttgttacacaataatcgggggaaattcattgacaccttcacttaccttcacgtcactatctctcttcaacctcttgaagtcgccactcgacgacttgatcagcattattggacgtgtccagaatttccttgtagccgccatgcgggtggagggtttcttggatgaggaggaaacagagaaacatcacgttcttggttctcacactggtggccaaggggaaattggcttcgagcacgcgacattctcctggccaggacagagcaaggcggcagatctctcatcaaaggacggcaagacaacagaaaatcccaaatccttctctctgaaaaatcttgacttcaaattcaaggtcggaaagctcaatatcgtcattggagctaccggaagcggcaagtcttcactcctacacgcgctgttgggagagatgccgcttgtatcgggaaatgttaggatgcctgccgcagcttctcgcgaaattctacctaaggacgagaagacagatttggtcgagggtgtagcgttttgtgctcaggaggcttggctaaccaataacacggtgcgcaacaacatcctcttcggtcaaccgcttattgaagagcgctacagggctgtcctacaggcctgcgctcttaagcctgacctgaaaatactgcctcaaggtgatctaacctccgttggagagggaggcgtttctctctctggtggacagaaacagcgcgtctccctcgcacgcgctgtttattccaatgcgcgccatctgcttcttgatgactgcttgagtgctgttgatgctcacaccgcttcctgggtcttcgaaaggtgcattacaggacgcttgatgcaaggacgtacgtgcattctggctacacacaatgtagcgcttacagcacctggcgcggattacatcctccgcatcgacaatggtaccgtggttgccgcgggttcgcaacaggacttggcagttcaaggtcaacttccggaacttgcaaatgggccgggcaaccatgccacgcctgagggggtaccgggcgatcgggaagcggatcagaagcccgtggacgaaaagaagggcaaggaaggggaaaagtctgactcgcatgccactgaacctgctgggcccaacacgagacagaccatcatcaaatatctcgcttccatgggcggacggaaatactggatctccctggtcgtcttcttcgtggcgcaacaagttggttccatcaccgtgaactggtgggttcaacgactctccaacgcgacggtagaagtgcaacgccgagaagataatacaatcgaagagtctcactcatggagattgaagcactactttgcgatctacggtcttctccttgctgtttattttgcagtcggcttcatgagactgtacatgttgtccatcggctcgctgacggcctcggtacgcatccacgatagtcttctcaagtctgttctgagtgcggctctcaagtttttcgatgataaatcatttggtcagttgatcggagtgttctctggggacatgcggactgttgatcaagacttggccatgctcgccattgccaccctacatttcgtagggtcacttattgctaccaccattctcatcgtcttcattactccgcagttctccctcccagcgattctcatctctcttgtctactactttattaccaaggtctacatctcctcatcgagcgacctcaaagctcttgaatcgacgcgccagtctcgggttctccagcattttcatgagacgctctcgggaaccgtcactatccgtgcctacggcgcagagagggaatatctgactcaaagttcagctcttcttcggaagctaaaccagccttcattctttctatgggccacggaaaggtggttggttctccggctcagtcttacaagtgcctttgtttccctatttgcgggctccttttccatcaggagtaacggggatgccggcactattgggctcaaggctcatcccgtcatatgcagcgattgttttctcggaacaggtactgtggttgattcgatattacatggtgactatccagaacatgactgcgtaagtcgtctacactcttcaaagcagtgaatcaacaagctaattccatgccttctagtctccagcgcgtttgtggctgcttggatgaaagtaccggggcacaagaggcaaaatccacaagggaaccaagcaaagaatggccttcgtcaggcttcgtagaataccgcacagtctctgctcgttacgcagcccatctagaccccgtacttagggatctttctttccaagtccggcctctggagagggtgggcatcgtcggccgtactggtgctggaaaatctagtctggcactcactctgctgcgcggcctcgagatcgagagcgggcagattctgatcgacgggttggacaccaaaacgatcgatttgcacacgctgcgcagccggctatcctatgtaccgcaagacccgacgctctttgctgggacgttgcgtctgaatctcgacccatacaacgaacacacagacgaggaggttctcgatgccttgaaacgagttggcttgttcgattcaagtgaaggaagagggaagtttacggatttatccttcactcttgcagaaaggggctcaaacatatcccagggacagaggcaactcgtgtgcattgcaagttctgtgctgaaaggctccaaggtagtcgtcctggacgaagcgacagcgtcgattgaccatgaatcggatatcaagattcaggcgtgtatccggagcatggaggccactgtcattacgattgcacatcgtctacgtactgtcatcgactatgatcgcattctgagtctggacgccgggtgcatgaaggagtgcgaccattcgtgggagttgcttcagcagaagaacggcgtcttcagggggatgtgtgatgcggcggtggaccgggaagagttgtttgcactttctaaggcggcatgggatagtaggcataccgcctgatgttacggacctcgcatttatttgttttgaatgtgatgaagcaagctcatgaagagtgggatatagcgcagctgatatagtaaggtaggtggctaaatcttccactatcaagctagaatttctttggataaagaggcctaaaaatgaggatgctttcagaccctaaacttgttttgtattccaaaacaaattatggccctcatcggagacttgtacggccaccataaggtcgacgtgggcctgcattgaaaagtgttgatactattgcacccattcggagggtcagcacttggccgctggtatgtgaggagagggaatttcaccccatttttgccatccgatcgaggcaaaactcagcagacctttctcaaagccgcaagaccaaaccacgatgttcggtatttatttttctgtctctttaaaactcccgatgtcccgcggtcatcccaggctgttttgtttcgccgttcaatttatcatgaatgatttttttctttgaaaaaaggacgacgtaacgaacacgacactacacacagtctaataaaccaccaatccaaaccaatcaaacaccaacatcaatgccagatgcattcgttgatacaggatggcaccattgcaacaccctcgaggcagttgacgtgtgggacaagccaacacacccatacctgttcgtggtgatcacagactccgcgggcacaaaaaccattgttatatgtccagtctcttccacggctcgtttggctccaacattgagcagccacaggatctcaactgacgggacacctcatatcgctgctcgaaacccgtcaataaaaaccaaagcacgatcaaattcccgtagaattacaccacgcagccctcaacaatcgtatggctacagccccgattatgacgacaacgataccccttcctcatcctcgagaccaacttacactggctacgaaagctcttcgcgatcaagcagtaacaccagaacccacgctccccagggacaacaatcaatcccggatacttcttatcccccatcctcatcatccgcatcttcctcctctcgatcatcaatatcacccccctcacaaagacaacagcctcctacagcggcgttggatccccctgtgcacaaatcttcagtcacaaactcggaagagtctactcacccacttgataatagcagcacaacctcggaaaatcatggcgcagatgatcaaccacctgcacccctaatcaaaccttctacaccaccaccaccgccaccgccaccaccacctccccctccccctccttcccaaccatcaaccaccagccctcaaccaacccccaccccaactcctgctggtccagatcttcagctcccttccatccccggaataacagacaacaacaacaataaccctggtcccgaagctcaaaaacctttcgacgtcgccaatctactcaagataggcggcagctcagtcttagggggcgggttgacgctcgtagcgattttctttctggtcaagtactttataaggagaaagcatggtaaacagggtggtgagggaggggatgctgaagggaagaatggtgatttggaggctggacttggggggatgggggttgggcttggtgggatagggattggacaacaacagccgcatcagcaacagattgtcgacgatgggagcggtagtcagccggctggtatatgacggtcaaggggaccgggagctgctgctcagcctggctcccggttggcgatgacgacgaccacgaagatgggggcattgggctatgcgattccgcagctggtgccttttctcctggctagagatttcgtgaggcattttcggcagtgatggatgggggtgatctggattttgagggctggagtttgtataatatccatcagcgaggcgttgaggaataataccaatttgtttgtcagatttccatcgggcctcgcaatcagtcatcatgcacatgcgccgcgtgggtcggggttgccaaaaaattccacataattccagacccgtcgggtcagcctccctccctcgtgaaagttacaccaaggcatgtgttatggaacagttgatttccttgggcgtgggtttttgggcttcatagcctcaactgcgccttcaacgacccagcccgaacaggtgcgaccgggcgggtccaacacgtcaccaaagttgagccccggctccggcgctgtttgggggcaggtagtaggtaggaccatgaaacctaaaatgcttgatcatctgtgtgttccgctgcggctttttttctttctttttttcttttttcaccctgtcaattctttctcgccgctggtgactttttttttgtcttgtgttcggggtgacggattgaactgtgcggccgagagagctttgaatgaagagggatgctgagacttgattgagaaggcgcagcaacaaccaacttcgatcgccgacggcacataagactctgtgtgttccgtttttgggtttgtgatgcagaaaaaaaaaagtgagtggaaaagggggatgttggaaaattttgttcatttcattgacagagagtggaaaggcctggctagagatatcacctcgaaacaagcatcaaccttgaaatacataccaaaggctttaaattaactcgataactctgcgcaaaacatcccaaggtcagtagaagttctcaccaccaggaatgtcaccaacttaaagccagctaacgcccttggcagatcctcacgaggaattttggccggtcaactaatacctcacaatggctcccatcaattcgtctcccgttgatgccacaagaccacccccaataagcgaatggaccgggtttatggttactctattcgcgataccctgcatcctcatgaccatcgcagcagtctgggcagtatggaggcagaagcaaatccgcacaatgtccttggttgttagtatggactatgaagttactgaggtggccaatgttcggacgcctctcttggctctaccatctacaccacaactcaaggccaaaaacacgcttgaaatcccggggatgcacactccatcaatcagtccggcgctgtcggggaggacagaaatcgcatcacctgtggaggaagagcagcggcacaagttcaaggatattcccgagttttcaatcagcagggcgacatgaaaggggctaatgagcattgtttggcattcagaggcgttgtgggcactaatcggcatacctacctataaggcatggcagagagttaccaggcagaaggcacacctattcactggacatacgttgacggggaaagcgtgactgtcacgcctgcccccccggaggcactggtgatgtgatcacgcaattgctgcctggtaatgaaacacttctccatcattcatctaaggccatgaaatcacaaggaatgagaactgcaatcaaaattcattgatcaagttctcatctgactccagcaaaattcactcacctccgaaaccccgatgctgccctcaacaccaacggaccagtttcaggcccgctcgccggctccgaatcggaaccaaaccgaaggaggacgctacttcctgcctccaccgcgttgcaaaccgcccgactttggcctagccggtgagctggtgccgactcaaactgctcgcctagcccaggaggcaatacagtccgtcgagacgcgaactgcaaagtcacgtcagaaactagcgggacagcggagaccgttcgatctgaaatgttttggtcattcaatttggtggtcagatcgcaatcagaagccgtgcgtgtgacagtaactgaccacccattcaacactacgacctgtcttgagaatggcaatcctgcgactttcctgatctgcttcatcaacaagcactcactctcacgcccaagtcccccattgtttccgatcacccttacaagaccttcaggccacccgagtcagacgtccaaacccggagccccacttcaaaatgggcggcgctgacgatgacatccccatcccggacatcccggttcacgtctatgtgatcatcggctgcgtggccgtctcgctagccttgtcgcagatactcgggctgtggctgacggggtttaaggagccgactccgacggggccggtgtatgttaggacgactaggacgctgcatgataagccgagtgagtcgacgcttgtgggtgtgggggatgctgtgacaggggcgctgtcgatggatgctacgggaagagagtctggggaggttggggagtcggtggaggggaagaaggttggggaggttggggagtcggtggaggggaagaaggttggggaggtggagaaaatcaaagaggaaggggatatcaaggaagataacaaagagacagaggatatcaaggaggataacgagagtggggagatcagggagccggatgggatcaaggagaagcctgaggtgtagatggggtgattttggtggatggacgcgctgcttttgatacccgggaacgaaagggaattatcgactggttggtgcgttgaattttgaagctgggatttctttcgagagtgtatggatatgtatgataaagccgaccaacctttgagaatgtaccactaccacttttactcaggctcacatactcactaccgtgaagccagatagctactgatggtatttgccacacacattgctaatatttgccctacgtgcctagtatcatgtttcctaggttgttttccatacccacgatcattacatatcgcccacttacagctaactatcacccgctacatctcgatgcctatctcttctttccagccactgtctacccacaaaagcaaacattcaaaatgcccacaaacgctgaaacagccctcggcatcatcgtcgcctttctcgtcgccgtcatcctcgtcgtccttatctgactcaccactgaacactgcaacaaaaggcgcaaaagcaaggcacaccagcaaatcccgcttcaccacactggtactacagcctccttccctttcctcattcaagagacgtaacaaacaaacagctacagcctaacccgccttcaccccgaggacatagagccacccccaataccgcaccggaaccttgaccaaaccacctccagcacgcccccatcggccttcaactccatggcctcctcctctccgtactgctagaccgcgctcctacaaccgcgactctcctaccctaccaagatccgtctcttcctcatcaatcgaagaaaaggggaaagaacctgagagattctacgaagcatcgtcttcaaagccaccggcagcgacggcatcagcggcggcggtgaaataggggagagtggagacgaatggcttggcatccaggggtaaaaaaaggggtcttcaccaccgtcggtagagccattttgagggatcaatctggggattattatgttacagaactcatacacaaaaacaattctactacaagatgtaaccgaaatatggacagatcccttctgactacctaccaaagacaaatacattgctgcatagaaacgtgggtaaaacagtgataacaaacaaaacacaagtccacccggtaaacccaatcccctgaaccataaccattctgcttgttccacggtgaccttgctggccaccaacaaagccgacatcgctcccccggaccatcggctccctatcggcccaacacaaaaccacgggaaatgtcgtggcatatatgatacaaccccccccccctctctcttcagcgtggcaactggcaaccaaccaccaccaccaccaccgtggcaatccgtgtatcagtcacacgcgagttcccgtaccaacccccctcaattggcagtgaataatcccgctctctcttctgactcctcacccattcgtcatcatccttcgtctggcaaccatgggaaaataacatgacccatgatagattctgtgtgtcaagtggcgagcactgtgcctgccattttcttctcgatcgtacgccatgccatgcacacagaatcttacaaacacggcttgtgaaacctgataaaaacaaacaccactccagagacagcatattgactcaagtcacgacagtagacccaaaagagtgggataacgctcatgcctcagcatcgagctccgatttcatttgttcgttccctctcggggccggctacctatcacccatcctgatgagagcgcgttatcccgtcgcttaatatcgtgatatgttgatatgatgatgattaagttcccaaagccaaccacacacacccacaagtcggaggcttcctctatcccagtccaccaccaccacacccctgatgctatcagaaagacaccttggtacccctttggcccgatttatacttgtcgcttgcagcagcccgccagcccatatccacagaggaaaaccccctcaactgacaaaagtgatgcaactccacaacgccgtcgcataacatgtctaaaaccagcaataaaaccccagtagacaacgagggaaaagaaataacaataacgccgggaccgcggtgggtcatggaccaaagtatccccttttggccaaaaatgattatacagagactaacaaaaaaccagcaaatgcgcggggggtatcatatggggcggaggggtgaaaaaaccgttgtcgctctcggtggccgcactttcccacagaggaacaaatttactggaacccggaaaactgcgtaatgcatcaagatgtagaggtcgccacacgctgctcagacgttgtcgcgggtccccagaaggagatcgatatgccgtgacaaaggagacgataaaaagataattcgggggtcggttcgggctgtgccgcaagaaacgggtcgagccgtccatagaaagagccgtgagaaagagatagtgctgacagcgcttagctattctgggtctcgctgcgccagatgcccgcgccgagaggcttgctgactccaaaccctacaccgactgcaatgccgacgatgaggaagatgagtaggatcttgacgagaattcggttccgtttgctgaggccggcgaggcagttgcaggcgcgccgattctttttggcggccttggcttttcgcttccagtgatcttgcccgggccaaacttggcaatcggttcctccctttgtgcactcggctgatctcttgtggctgttctcgttggtgatcatggcctcgatatcggtgtcgaaggggtttaatcggtgagtggtagctggtgtagacaagtccgagagtcgcgacgctgacgtgtccttctcggtcagtgttgggaatggttcgggtgtgagtgtctcttgagaagtcttggtagacagccgggacattgacgtcgtctcgacggtcaagcccggcttgttgttgttgttgttatctgttagagaagccatgatgtgtgctggttctgtgagcgttgtttaatggctgggagctgtaattatatcgcggcagtggccgttctggatctgtatgacagagtcgattgatgttcgtgttcgaagttccgggagtcggacggacaaaaggcaaagccacgagaagtcgtttgcctggaaggtgtcagtctggggggacacagagagttacagctcacaggccgctgggaaagcgtgacgagggctgtgacaggtctcaggttttcaggtgctcttacgattagaatggtcgactgacgatgcttgtgaataccgaggtgaatagagcttgttgttgaagcaaaaagggcccgtgaccccttcccagcaggagattgagcgggctcggttggagaaatgtctggcagatggtgtcgaacggtgtgttgtggcatccgccgccttcctctcaaaaacgtcctcgggggccgttccactcgccttgtcagcggtgttttgagggcaattggggctgttgatgacggagggagagctgtgaggttcgttcgagaggaatgagaagatgggcgactgggcagagaaatgggaaatgagaagcagcacctccccccggaccaagctgcaaagacaacaggtacccaggtacctcctggcgaatgcaccaatgggaaaggggcggtcagcggcagcacttggcagcacttggacctgggggtctgggctgccattcgctggcacctgctgagctgtggatagctcgagctccacttccattctcggtcatacagccccactgtgattggccggccggctggcgctagcttctggggttgcaaagctgcaaactccatctcccgcatgctgcatgtggagcggaacagcctgaacctgaacaggcacagggacttcctgaacacaatacagggaacagcgctgaagagctaatccacatgaacgaggcctctgacgtgctgcataaagtgctccagaagagatgacccacaatatttctggaccagattgcgacgcgttttatgaaggcaggccgccgtgtcgggtcgccgccatggtcagaggtgtgttgtttaagacgacgacgacgggactccagggacggacacggcagatatgtcggtcaactgttggccgtggccgctccggcaatcagacgaagacaccaagaccaccagttttttggtcagatgatggaacgacgggggccattgccaaagacctgggctggcaatggccagccctaggacctgggcagggactaaaagtcttgaccggttcgtttgctaggtagtgtcgccttcgattttgtggttggattataggattaggatcgtatactgtgtgatgccacctgctacgatgggaaagtgtagataagaaacggcaagcaatatcttgtcatcagcctcaacgacccaaaaggctggtgctgcccagacgccgcgcgaacttccaccgagcaaagaaccgaccatcccacctcaccacaccatcacgagtgcgttggatgcgctgggtgcgctgggtgcgcaaatgcagttcgcccgcacggtagtacactgcaaaagtagcagcgacgcccggcattttgacgcatttcttccgctcttttcattttacccttccgtgcgtgcagccactatgtacttggcttttggaggcttgacagagcagagaatggttcggacgcggtcccggctcgccttgccacgcatccatcccaaccatccatccattcccccactgctgcaagccacgccggtgcccatcacgaacttggactgctgcttgaggcaatgaggcaaaagggcaatgggcaagctggagcatagcacaacagcaagaccacgcatgtgaggtatgtttgcgctgcgcagcaggtaattaactgccgacgtaagagtctcgaatcttgatgcagtctcacaaccgatcgacgcctctggaccgtttggataagatacggctcatacagaaacagcttgccagccaaagttccaccttcataaacctgttatcgtcttcctcttcttctcccccgcttcttcttcgcgtaggtatcccgtgcgtgtgtgtcccgcttatttttctaaacgcgcaaacttgccaaagataaattggatggtgcctccaagcgatgtaccagcatgacatggtgaaggcgccaagcttcatgtttcgggcctcctcgtctttctcaaatcatgctccaacggacttccctcttttgaaatgccgcacagccggcggttttggggcctgcttggttctcatcctttttgacctctttgcaagtttgtgggctattgatgccatcaacacactaggggactaggtaggggagttaagttaatatccaacgcacgtgtgtcttccctgtcctctagctgggctgggcagttgaagaaggtgagggggaaaagcacgttctatttcctacttttacacaattccttttccaatattgcttcttccaacccccccacccgctatacatacagcacataaacgtgttgtgtgggcttgcggcgcgaggaatcgacctttcctgcttcaacaccggatgcaagcccactgtcaaaaaaaaggagacaactggactggctgttctcctttttggctttttgactttccgctagtgcgtgcggcacaagcagcttttgggccatcatccagagtgttgcatcttccctatcttaaaaattgggtcgctgcccactatgctattctgggactagtgtgtggcctcaggagttttgagtgtgacactgcggggtcgttttcccgttcaagcctagaaccctgtcagagttggaatccttgctccttctctctgttggagcgggcggggagcctgtgtggaaaaccacaagcggcggttcggttgggctgagtgcattcaccattgattcgttggctgctgttctggaactccgaaaatctgtgtggaatttttggagtaggagatctgggatctggggatctggatggatctcgtgggcaacggttttgggttccagaccatgagaaggtgtgggtagggagggtagaacgagttgcctgcccgttgaagacaccgagaagacacagaccaaacagcctttattctagagcgatggtttccgcggatacaaacctcacttgttgtttacttctttatggtcgtgagttttctctagtctgctttatccgaagtctttgttacgtttctctcattctcacaagtggcgggaaaggatatttgtttgtcaagtctacgcgagtcatcaaactgcactgcccacacgaaaatccgatatcaaaagcccgtatttaccccttatctgctattacgtcccaaaccttgaacccgacacttgcagtctcacaatacgcggactgaaactttgacctccgactccgcctcaaaattgattgcctttttgtctttgatgagctacttttctagaatacgagaacatgcagttcgtggatacacaggtaaggtccaggggatacgcgtaacgtagttgatgagccttgttacacacgccacgcatgttgtggacaaaaagatggaggctgctacctgaaaagttgcacagttcattgattgtagttgtaaagaagtctttttagcatggttaaatacccctgagaaggtgactctctcaaaacagtcgggaggtatacactcccttgctttcatcacatgctcgaagccatcattgaagaaaagctcggatgattgcttgctcttgcatcaagtgagcttcatctcatgtattgtcagcatgcaaggcacagcacaggcatcaagctcaaaagtgctcgcattggcgcgtagccaacctcccgctatatgagatgatcgactgtgatgggacggatgattgacggtgtcaaagcaggtccaccaccatcgttcattatcctgtggggaatctacctcatgagatggcgcaataagccaaagcaacgctacgcaacaacaacaacagcgttcgctacaaccgggcctggatcctagatcacaatggctttgtgactctgatggaggttagcgcggatatcatacttgttgggaacaggagggttttggcggtgattttgtgataatagcaatctaaccccagaggaaagggcttgttggccaatgatgagactctcttttctgaggagtgatggatagtaataccattctctcttatacttttagcgcccatcacggttatgttaactatagataaaactatttcgaccaattcaatgtgcagtatacttacaacctccatctcatcgcatgcaaagccgggggccataaggctagggtaaccgacaagtcacacacaccttcctcgttccattcttccgctagaccgtaaatgcgagccgagcaagtgaattggtccgggtggctaattcggtgttgagggcgtgcgagtgtaaacgtcgagattacgcctgagggcgcgcgtgggagcgttcatgaagacaaagcccgcgcgcgtggccgcggcgttcgtgagatttgtgtaaccagcctagttcttctttttcttgaaattccgctggaagatgcaaagtcctgttgatctcgataataattcagacgaaaataatcaaactacggaaagccacaaaatagtaatttccacaaagtgaaaacaacgaaacatgggatttggaaccaaggctctagctatcagccacctgctcgaggcaaataccccaaaattcccaaagtcctcccatcccaaattatcattcccctattttcctctcggcgtctttagtcgcaagaacaccattcccttggcgtctttcgtcgcaagtgagcccggtgctcaaaagaaatcagtgtcccccaaccccatcctagggttcgcaagggaacggcgctttgttgccgctggtgccgcagacgtggcatgtcctggggtaggtgaaacgagttagcaaggtgatattggaagatttgagatcaagaatcgggaagagcaaggtgagaatgaaagaacataccatgtgacctgttcgaggtactgtttcttgatgagggaaacagggattattagagtgattagtttatctggagagaagtaggtcagtgtatggtctgatgtaaacaaagagctctaaggggttgaaggaaagtccatacctccggaatccgagtccttaaaggcttcggctgaggatctcttgtttgtcatcctcttgttagccaccttcttgtttgtccacttcttagccattgtgattgttttgtttgacagtaaacagatagttggctaggcaggcaggtaggtaggcaggtgatgggccaccagacgcaaggtgatcgaacgaagaggctcctcaatgtttgagggtcaaatgcaggtacgatctcaaaattgctgggaatttatactcgacagaggagtaacttcctatgcaaccgtgcttttcgtgtatcatattgcttattcactttgaaagctctacacttcactttgttggccaattgccctccccacaggacaggtcctaccagtggtattatagaactgggagcaagacggtcaatatggcagctacgcgcgcaaggcaactaggcagcgtacgcgcgcggttgataatgtgacgtttcgtcgctcccaaagatcagatgggtatcgcggggccatctccatccttcccatcctatcgtccacattctccgcctggtgaataggacacgcgtcccatgggaagagttgagatgaaacagacagtgctgtggtcagcggccgtttgctcgactgtcactagacaggaatataagccgtggtgttagtaggacttctataaagagccctagatcttcttcctcagtggtgaaatggtcctgcttcttcgaacaatagcagaatccttagacctacccagagactacaaagctccacagtagaatgatcgcctctatgatgttggtcttcctctccatggccattcagctagccgtagccggcccggttgagcccgcctccgcacaacaacagaaaagctcgccactcggcgcctcaccaccctcagcgcacatcctattgtcaatgattgccacagcgtaatcaacaatataggcagtaagctgaaatcctctaaaatcaacacactgtctacctctccacctgcatttctctgaacataaaatgaaaagcatcatccggaacaggaaaactggacctcgatcctcgaatgtgcgtgaccatcggtgtcgacagttgtgctggcttcatttgcaactaccacaacttaccgtatcaactcaacctacccatcgccgccatagaaatgactgcctatgtctacgacccttgcgttcgaaacgaccagtatggccagtgggccaacgtatggtatgagcttgtattggtgcacatgcctatcataccaacgccacccacaaacccatggcacaacaagatcagaatcgaagatgtaagacagtttctgggaggaaacataccagccgaggtggatggtagtatctcacagccttgagcagctgcggcaggataatctggggaaaattggccggtatgtaggggacgtcgacggtcgtatctcatagagtaagcggctgggggggattatcttggaagaactttgatcgtgatgagaggaggatattaattgtatcatgttctgagaagtcgtctggatgcaccgctcagtaatcatctacatagaatgtagaaatattttggtgcccaggtcgaaaataagtgttttctgaaatcaaagaagtgttatgcgttgcggtccaaatcaaatctctctctgcacaaaactcggttgatggttaccccgccatactgtcacaagtcagtagacgtcggagggaaagtggcgggcttctctgtcacaatgttccttccttgattgatattcaagtatagaacaccctgcccaaagttgtcacagatccacgctctgtttctcagacacacaccaccacacccagcggcccaacaccctatcagcacgatgctgagctttacaatcctctctgtgctttggctcgccggactcgctcttggggggcaggctgatcctgcaaaacacggctggattttcgacagtatgatgaatgaactggattgctaccacgtcttggatcaattcaacggtaagtcgccatgtatagcctctctctactacaaggctctctatcctcttgctaactacgactgccttacatagaaagcgctgatgcaaatcaagtcatcgagctgaagtatgaagagcccaaagaaatgctctacaaaggctgcagcatcatactcagccaactcgatatcgagccctggtacacgtacattagcttgaagcagatcttgcccagcctagcgaaatatctttactaccaaccgaatatcaaaaatgactgggaggcgacattcaacatctcggaaaaccagtcgaatagcgaatcaaaaatagcatacgtcaagatcctgaagtattccaccgatgaccaaaacgaggccaatacatctgccaattctgtcgaccccgacgcaacttgtttcaacatgacagaatttccaccactcgtccaggcagactgtcaggcatcgtttgattgttagtgttcccctctgactttccgagcctacccaggcccccaaaaacaatgcctagatatagcagaaactaactgatcaccagtatggactactggaaccaaagccttctttccgaatcacgaaaacatgacatgggagtctggttttcttagcttctccaacgacagctccacttgccagtttgtgatgtataacaatgacgattatactgcatacgtgagcctgaccgacgttaccgaccaagtccagcatcaaatcattgacccttgcgtctctaacggttggtatggaggttggcaaaagaataatacggggctgtatctggacttcaagaacaggggcgtgctggcatggttcctacccaaagagttctttcccgctgttagatggacctttcctgagtggttaaaagacccggcggatccgtgggattacccgccatatctcgtgttcaacaagagcaagagccaagtgttcaacaagagcgagagccaagtgttcaacaagagcgagagccaagtgttcaaccagaatgagagccaagcaatctctgattgatatcatggcgggtactggaaggcaggcagtgcgggcaatgagctgatctgagctgagcaggcccttgacttgatttggctcaggccggccacgtcaaacttaacttgaaggtattataacttaacttggcttaggaagattattaaatgtaccggaagtggtttttcccggccgggtgggccggagcactggttccgcggagggcacctgtgggtaggttcagagggtgccctgccggccacctcactaccataccggatatcaccacgttttgtggggctagagagatcactgatcttctgagctgagccaataggaagatttgacttggctcaggccaatatagggatgacttgacttggctcagctcagctcaactgagccaagtcaagtcaagtctggctcagctcattgcccacactgaaggcaggcttggacgggtttaacatagctcaaatagtggttagtaggctgagctttcgtctcaccaaaggaactttttgggacctcatcgtggtcattaatccacaccgtcatgtgagtcttgatttttcaccgtgttgcttggacgtccaatcctttgaatgaaaagtgtgaggcatgacaatttagagccgattgttcttgtactctttcatctgacgacacattactgccattcttccatcttcacccagatgtttcatgcgaagtatcgaccgggccaccattcttgttacactgcagatgaccgtcgcaagtatctacgtcgtcagcgtactgctgaccaacatgagatttacaacctctagagaactcattcaacccttaccgaactgttggtccagataaatatttcgtctttccccctgagaaccctttttcattgttagcctttcaaaaagtcaaaatatacatgaaggggtcggcgaaggacaatgtcaccttcctcacctgccacacattatgaaaaataaaaacccgaaaacttgaactacgaacatactaagcacctatattcacctgcgcaaaacacacacaaaaagagagaaaaaaaaaggcctccgtctacaacgtgctcaaataggtgaacaccaaaaccgcctacaacacacccatgactcagcaattgtgaccataaagaagatgcacactacccagcaacaaagtacctccctacagacctccacgatcaacacccaggctctaatacctagcacatctcacaacaaccagacacaaatcccaaccaaatgtctatcaacattctctccgttttcttttcatgagcggggaatcatatatatcctctttatcaaaaacctcataataaagtcacaaaaataccaaacaccctcctcccaacccaacccaacccatccatctctttgaacaaaacaaaaagaaaagccacaaaaaaaaaacgcctgcctctttcataaaagtcatcttgtagaaaatgaaatccctttcacactcttcttttcccatatcataccacccatcctgaccaaaagacgtgtatatacatcttttttttccccacctcatatccaaaaccacccccaacatcccccttaaaactccccatccccaccagcccccatcacccccgcaacccaaagcccaaccagcccccaccaattcacattccaacccctcgccaacccattcaacccctgaccccgtctatacaccgtctccgaaatcgactgctgctcctttgcctgcttcccacccttcttccttcccctcgctgtctccaccaccttcgaaggcttaacaacagcatgcgacccctcctcattgacaatactgtacatcgtcccaaacacaccattgtatttcccaacagggacaatagtctccaaactttctggcggtgccacagcactcttcttgcccttgacaggaggaggcgcctcgagagcttggaggtactctggtgtgttgaggaccgcgacctgacctctgcggaggaccgtctcgagtgggagcttgatgcacagcgctacagccgaggagcagaatttggcgatggagaagctcgcgggagcaatctccctgtcgatcatgaattgtgttcggagaacaaggggtgttgaaagggtaaggagagggtggacgagggagtggaggaccgttgggaaaaagacggcggaggggcagaagtaggaggggaggctgcggagggcggtcaaggtgcgcctggaagcgcgagaggtggatgtgataatcatgctaaacgttttttagtacatggtagaattagacagcttcaaggaggcataccgtgtgcggatcagatccaggggagagaggatcaggccagtaacaaccgccgcggcggcagccacacaaagagaggcccatggatatggtgcggcgatatcaatcaaccggtcggcatcgttcttgacgccgaggtctggtacgttgagaagggcgctgagtagactcctggaccagttctccagtaacgagtggagtaccgagtagataaaggtcacgtttgaacccttccaaacaccccacgcaccttccttctgccatagctgtgcgataacttccaacacagagtcgggggttcgaatggccagttgatgtgccggtacaggggctggctttccaggcgttcgtggggtatcaagtggggtcattgggttcggtctcccgcgggtagctgttggagagggagttcgtggttggtttgaggtgaaatatgccatttcatcggcatccgagtctgagtcggggacttgttcctgtaagttgtgtgttagtcgtctgcttggtatggaagcggggcgtggttcgatggtgttgcccacgatacccaacggcagcatacctcgtcgtcaaactgagtattccacggattcgcagcagcagcagccgctgcttgtgcttgctgtcgccttgcctcctctgcttcctcagcggcagctgctagtcctcccaaatcatcctgtttcctgacttgcatgatggtcttggccacatcgaagggttgggccatcagcaccgacgagtacttccatagcagctcgtccagcacctccttgactgtctgtacaactgatggcgaaggctcggctatgtagttcttgtagtcgatgtcggaaaagaggtcgcgtgccttactagcatactggccggttgagttgccggcttgggcgaaggcttttgggccgggtggtgtggggagggactcgggaggttcgccgatcgaagggggaatgtagtagggtctcaggggattgaccccgttgtcactgtggtgagccatgctggttactggtgcttctgtaggcgtaggagcatgttatggtggtgaattttgggctgggttctctggcgaattgccccgctgatatttcgcatgtgctgggacacaatgagatgcggtgaaatcatttggcgataagctaagcatgcaagagctaccccaaaagagcccaagcgccatccccatattgcattatcggggccgccgataagcgccgcccgcccacctcaatgcttggctactgtcatcttttgcgggtaaattttcatatcgtttatcgggatgttgaatggacgaatgtgggatcagataatgataattcattattcagttgcctccctcgtctcaaataaccatacctgctccaccgtgtgccctttttgcatgaggcagtgaatagacacagaggagccctcagtttgcgtattgtatatattgtacctcttggcaggggtttctcggccattaggttgtttgtcactcgcagctttccccgggtttcggagccttctaggctgtttgctttttctctccggcttcccacgcttgtttccctctcaagtcttcctggagatataaacacacgccaaacagtcaagatgtcgacccaaagagtttttgccagcgtcctcccgagattaagggttgcctccagcaagaatgcgacaacttcccttgcacaacaggcacaacagctccggtgctacagcaggccgaccgccaccttgagaccttccggtccggcccggtcctcggtgctctcctccgccgctgcctccgcccccgcccctcgccgtgtatgtgtaccggccacatcctccactcaacctcgcaccttgtccacctcagcctcacttttccatggtcatgtcgacaccccaaagccaggtgaagagtatgtgcaaaaaccccccttttcgacatccctgaactaacacatcaaaggctttgggtaaccttcatcgataaggagggtgttgagactaagattgccgtttgcaagggcgacaacctcttggatattgcccaggctcatgatttggagatggagggtgcctgtggcggttcctgcgcctgctcgacatgccacgtcattgttgaggaccctgactactacgacaagatgcccgagccggatgatgatgagaacgacatgctcgatcttgccttcggtcttactgagaccagtcggctgggctgccaggtcatcatgactcccgagctggatggcctccgggtcaagctccctcccatgacaaggaaccttcagtcgagcgacttcaactaaggcctgccaatatatattgcattctccggattatcgtttcttggtcggcgttgcggcagcgatacacgggcatagttgttaaagatagataccaaaagcatagggggctggctagtgcgttttccgcgcaatagctcacgatgtaactgatgacaaatcttgcggctccgggatggtctgggaatctcttgctctgatcgagcatgtgtacatgtaaaatagtagtaaggcatcctatactggggccatgtgtaaataagatgtaacctctgctctataagcagtagaacacccctctgtctccccaacatctgtaatggagagatcactctatgcctcctccaagccacccttcttcaaccctccacccccattcgcaatgaggtccaggaagcctttcctgctcatctcggtaatcttctcctccttcctcttaacacccaccataccctcctttctgaccaccctttccgcctccgaagccttgacctgagctgcgcgcacggcattgaaaagtttgaccacaccacgttgcgcaacctttctcaacctcctctccgtcgccaaaagctggccagttgtctcagcaccatcctcaagttcctcctcaatctcgcccgtctgcaggttcagtgtgcgcttggtgctaggtaccaacacatctctcacgcggcccttctccatcgccaaccgcttctgctcgcgcaatctcttgcgtgccttggcctcgagcgcagtatccaccagctgcttcgcattctccgccgctaccgcgctgcgcgctacaattggatcggcgcgcttggaggtagggagtttactggaaagcatcttggagatggacgtcgcgaaggcttctgggtcgttgcgcttcgacttcatgcggttcgcgcctgtgccaagcccatcgtcactgccgctgtgggcgtcgtcgtcctcgtctgaagatccgtcatcgccatcgccatcctcgtcgccggaggagttatctgaagctggcgcatctttggcgacaaatttcttctgttttgtctctgattttggttgttgggatttggacttgggatttggcgccgaatcgctgtcggactgggaatctgagtcttcggcttcggtggaggcgccgtcgtcggcctcgaggttgtctagatcctcttcgtccgaatcgagcaggttggagggaatggcaccgccttcgtcattctcggagtcttcttcctcggagctgctgtggtatgcggcgacttgtctctgcttcttggttggtctttgtgccttgcccttggggccgtcgctgaaggagcgcttctttaatgatgatcctgccatggtgtggggtgctgttgcaagtcaattgctgcaaagacttgtgatgggtctggagttgatgcggatgattgtccagcgcactcgttgttcgagcgagttccccagaaatttttggcggtgaatagcggcaggaatgtgccccgctggtgaagagtggagccgatgccccaagcttcttgctccactcgagctttcaagcttcattttgtggtgctcaaggtgggcatgtgaagcttcgtctggcatctaggaaaactcaatctacatgactaccaactgtataaatgtttattttagatcttctcacctcttctagttggagcaatattattatctcaggaattgccagtttcttccattgtacactggtctcacaacatggcattcaccttggccaagtagatgacttctcacgcaacaacaggcccacccaaatgccattgtgtttgtcgtaacccgcggcccggtcgccggtatctcaactaggtttctgatccttcctggaggtgatgtttcgccgtactaaccggttgccttctagatatgggttcaccaagaccaaaacaaccctgcgccaaggtggtaagcctgactctttgaggaactattggcttagtttacgcagacatccagacaagcgcgtttacaatggcagttcaaatactcctccacatcccgtgtctcatcacaacagccttatgctcaatctatgagcgcgcaatcttctgataccagtcagaatggaaactcttgcgcccaccacaacgggtgtccttaccctcaacccatcctgtctcgcgacgaccaacctatgggtggatgaactttgcacacgtcccgcttatggtggtggacgatgcactcgctacaatctaggcataggcgagggttgctccatgagggctgctggcgccaccggctatgatgaaagaattgctttcagtgactgcccggttggcatgaccccagcctggtcgttcactggaacagagttgcaagatgtttccctcgccaccagctactgctgcccgaccggttttgacttttctgtctcaaccacctcatggccaggctcagggaccttgcgagctacttgcattgccgagtcgattgagcggctttcgggtcaaacgctcactctgaaccaggatacatatcgggtagagacgtctgggagatccaccatcaccattcgtgccacgaccacgaccgcggcatacgactatgaccaagacaagatttttgcccaagcagcgagtgagtgttgagcttgtgctgatgctccctcttacatccgttatactgaccctttgctagccatctggaaatacatctaccccggtgctgagacgacatcaacatgctatggcatcgcttgcaacccaagcaaccccctcccacaaccccccgagaaaacaccccctccctccaccttcacctacacaccccctccccccttcccagcaaaccaattcacccccgacccgtcctgcctcgccgagtccaacttctggcaagtctcaacctactgctggatgtcctggcccaacccctcccccgactggctccgctgcacccacaccggcttcggcgaaccaaacacctacctccacccagaatgcttcccctccgccaccgtagccccccaatccgccgagaaccccgacatccaaacctggtactcggaatgcccggtaggctactccgtcgcaaaaaccttcacctcgggccgcttcgacctcccaacctacgtcttcagcgagccctcccccaccaaaacctacgacgtaaccgccacgggcctagcctgctgcccctcgggtaaataccacttcgagtaccgccgcgtcgaaacctccatcacctcccacaacggcaggcgcgagaccgtctccctctacatcatgccctcctgcatcgccacccgcgtctcggctctctcggggaaggggatagcaatgaaggagtggtacaacacagccgtctacgacaagaagcgagacttgggggagcgacaggctaaccacgacgcggaagctaccatcaccgatgcgtggaacatggataataccctgtatgcacaggcgattcatctcggctacaccgtctttcgcgatcagtacacgtgctacaccaactgcgacgagtatttttacaattccttcagggatgtcgtgccaaatacgtacaagacttggagcccgccaacgacgacgactacttcgacgagtacttctgatgggtcgtcgtctactggagacggtggcggtgataatggtgatggtgagggagggaatggggaggaggtggtgtctaccagctcgacagctggtgctgctgagcaagtgggacggtcggggagtattatcatcactttggtgactgtggtgacggtagttatggggttgggtgcttgaagatgtgtgtatgggagtgtgatatgggaaatgatgatacccagtgtgtatatgatggatgatgtaattacgatggaggttatgttgatgtgcgcttattttgagcctttacagttccaagaaacaccttgtacggcaacagtgggcatcgaaaagaattcagtcccgttcttcacaattcatgatttaatgtgttaatatcacagcaagggcattgcccaatcatgtcatggctacagcattacacacacgtcatggacaggcagaaaaagtagctatcccaactgatattcattaactcctgctccctcaaaccctgctctacagcgcattaccaattacctaggaaagaatcgcccatgcccaacactcgacagtcatttcctacctcgacctcgccatcacccacaacaaacagtcacatcctccaactcgccacaccgcttactgtcatgtctgtctcgtcaacacacacgtcagcttcatctttcttcccttctttttccagaaacacttacttccccaccctcgtccagtgaaacaacaaataccccaaaaacaccccaaagaaaatcgagaacagcacaaacccattatagtacatccccatcctataatctcgtcagcatatcccttcaaccccctccccaccctgaaaagtactcacagcatcaacaaataagccaccacaaaattaaccaaatgcaacaacgccctcaaaaactgctcacaaaaccccggcctataacactcgcacccttcctttctctcgtgttcacccccagtatgatgactctcctccttctgccgccgcggcctgctcgcacactgcccgtccacttgtcctatcccctccccatgtgccgcattcagattaaccgcacttgccaccctcgactgctccgccgtcagaggcctcagagacgacgagggcgtcatcctccttcctacaggatggggagggacaggttccgtatctatcaagattatctcaccgggatggccgtgatgttggtgatgggggcatttgtgggcgtggtgacggaggaggtggcggtcgtattcccgagtcaggcgccggagaccttctagcaaaagggcgaggaggaggacggcgatgcaggctgctgccatatggccgtcgcttctgacttgctacgtctctgagaggaagcaggagtctatggtgttccagttccaggtcatctattgcatagggggttagcaaaggggagggaaatgggaaggggaaggggaagggaaaggggagggaaatactttgatgagacatgctggctttgtgacggcgtcttcgacgatgatgatgtcgatggggatggggactgtggtgggggcggggttagacatgctgggctgtggatggggtttggttggcggttgaggctgggtgggcggtggtgtgatgctgggcgtgaggttgttgtgttgacgggagtaagtgcttgtcggaagcagatagacgatgattttggtgtcctggaggtggttgggcgggggtatactgatgctggatggtgataatggaagacacgggttgtgaggtaaacttctcattaaatcttggacaatgggagcaatgcgtccgcagtcaaggcaattcttaccctgaatcaattcgtttcaagagtgccttcctgcccggattgatggaaggaccaccaacctgcctggtccggttcgccggacacaagcctccgagaaatgatgaaaagggcaggcacgatgcagagaagatgtaatggatggggcatcactggtcaacctcctctatcaaggccaaaaacacaaagagagtattacgcataaatggtatcacaatatccaaaccccacctcccactcactgattcccaaccacatacctcgccgtagcaatcctcatcctcttccccgcccacaatatcggcacaatcaacaacgaaaatacccccataatcaccgtaaaacctccaaacggaaccaaatacccgtccctctcaatccactgaatgacaaacagcaaccaaatgaatggcaccattcctctcaagatacagatcatggcaaagcagtcactggcgagctggttgtacgcgtcaatgagctggaaaatgaccagttagcttcaatctcattgatatcatggaaggtgtgtggggtcactcacataactgaaccacaaactcggcacctgcgtcaacgcaaaagccaccatcccgtacgccacctgaagcccaatccactggtactcccccggatactgcgcacagaacccaaacaccaacagcccacccgtccccaacgccagagcaggcaacataatcggcagtctcgtctccggctcggcataaccgtggtcttgcttcttcgcaaaagccttcaaccggcggtctgctaggagggcagtggtgatagcgccaaagactataccaatcaacgcgcctatgaacaaaagccccgtgtccgcgccccagtcatacggcggaagaatgagcagctgaggtccgatggtggagatgacggccacagcaccgaccaagccaccatactgcagcatggcaatccacgtggctggcagccggagggtataccacggcttcataaactggtacttgattctacctctgtacatcccaaacttgagcgaatcagaaaaggtataagggtggtaggagaagttccccgggcccgttgctctcgacgacctgacctgctttgacaatctagtgggtgtcatggcagtggagctgctgaggtccccagaagatgacggctgataccatgtatacgtcgggtccaactccccggtataccgaaacctcgacggcagcgtcatcctcatcgatggcaaagtaaccagactgaggtacggcgcaggtgtccggggccagtacctcgatggtcggggaagattcctctggattggcaagcagtgggctccacgttcgtagatcgtttccgggacgaataagaccgaacacaagaatgtgatgcccgccagaacagcgctgacccaaaagacttggaaccaacccagcctgacagcgatgtagccgcctgatataccgcccacgacggagccgcttgctagggctgctgtgtagaacgcctgagcagccgcgtcagcgagagttcgatgttggagaagaacgagagaaacataccatccacctccccctctcatgcacaaaatacatctcccccaccaccgccggcaccaccgtctcggacgcactactcccaaacccctgaaagcatctcacaaccaagatgccaacaaagttggaggttgtcgccccgacagccgtggagatgaacagaatgagcgccgaaataaggacaatggccctcctcccaaagatattcgccaccggcacgagaaatacatttccaaaccccaacaggagaatattgtactatcttttctgtcagctcgatcattacccttcaccctttttatgagggaaagagcttaccgcaacaaactgcatcaactcctcaatcttcctctgatcctcgggaaactccagattccacaccggcaacgcaggcgcgatgcaagccgagatgaaattgctcacaaaggcgtacagcgagacggtgctgatgcacgccagcttcctccacggggcccagttcagggggtctgccgggtctggggttgggagggggtactttgagaaccgatccgttgttgtcacgcctccctctgggatgacgaccgtggtcgtgggctcgatcagccggaccgttcccgggggtgtggcggccttgacggcttctctgctgagggagaaggcatatttccagccgggcatcctatctcaacctgtgtggtggggatgaaaaggtggcaagtgatgagatggtaagaaagggggaggaggggggaaagggggaaacgagcgacgagggggcaacggctttcgacgagcagagagcattttttgggcgataacatggttagggaagggcaaagtcttatgcgaggtgtgtggtgtttagttggttcccgaggacccgaaataaagatgaaacccccgtccgagaatatgctgggagggttgggctgatggagagaagcagggacgcgaacgcgcttgtgcaaggccggggccatggtggaagtttattcatgttcctgggggcgacagtgctgacgaggacgctagaatttgggatgggagctgtgtactgaatcaccaggtcactagtaacgaggcgaataaaactggttctttttttcaaagggtgagatgtgctgggatgtttttgaaaacatatatcaaaagatttccgaccctgagagaacgacagattaccagaagtgtcttttccttcccattgtagacaaagatataactatcccaacgtctatccaccaacacaggtgtttcacaacctacaatcttccgtcgagtgaccgtagtcattgcacgaaagacaccacgtctcctccgtcgagtgagcaaatgcacagcgttcgcccctgcgacacccaacagccgtgcatctctttgttttccacaacctaaagtccttggtcggattatcccgaaagcgagccatttccttgcttgtatgcttataaccacattcacccctatctccgcaatgctggcctttgggacacccttgagtcccgcgctgagcacgtccgtgagctctccctggccgagatcgagacttcacctgctcccagccctcctcatcatcgggatctccgcccccctcagcctcggcctcgtggacttctgctttttcgtctccggcttcgggtgggccacttccaagatcaacactgttttccagggagctttgcgcgtcgtgtttcgtactgagaggggagctggaggctcggttgtcattttccagcggtaaaaacatgttgctcgtctcgacaatctccgacacatccttgttgaacctactggcatagacgggccatgacatgatggtggtcttctcgccaaacagttcccgtgcttttacgatgatggcctcgatgttcttcaccgtggggaactcgacgaatatttctgatccattctttgaacgcgtggtgtagaacaaacgtcccaactcgaggaggaccttcgccacgtaagagtcgttccatgtttcctcagcgagatcctctggctccaaaatcacaatcgtgtaggcgggaacgaccctggtgtttcgggtggagcggaagttggtgaacgacacttggttgaatatgttgtccaagaacttgaccgatagtcggccattggtatttctttccctcaagtattccctggccatcccggagttccacccccagagttccactcggatgccacatcccaacacctttctgatcgcggggagcatatcgcgatctcccgtgataacgataaagactgttctttttctgcgctcttcgacggcttgatcaaatttcgccacggccctaagatcaacagcctcctcggtcatatctgccgacatggagttgtccacctccttctccctcccattggcgccgcgatcgtatatcttggttttgaagctgcacttcttgtattggtcccataccaaatcattaggcggtggccgagagccgtagatgtaagattggcgctgaattcggccatcgcagagtgtgttgactaaccttcctatattaatccggagacgtgggtcctgatcaccgtctgtgagcttgggcatatgtgaattgcccgaggcggcgaacttctgagcctcgatccacacgttggaatcgtccacaaatagcaaacattcgtcattatcggcatccattgtcgccggtggtgtgattcacgcagattaagggtaaggcagagcgtaacgaacaacctgttgcgagagtatggcgaggtgagttcagatatatatatataccagcgacaaaatctgggcttttcctactgttgtgcactgtcctttgctgttgtgtgtgcctatcctttaaatcccatcaacccggtgaaaaatgcaggttgcttgataatatttctaggccagccgattgagccaatatttcaaggatcgaaacgtttgcaaccgctgtggcaacagttccccgccatccatagcctatcatcgccaatctgcctcgccatttttggtgacctgcaggcctgtttgtgttgacctacctgatatgcgctgcgacgtggaccagtgacactatggtggcctagaagacagcagctgcaacagagtgcgtattcgcactggattgtcgcctgttgatcaccccgtcatccccggcttgtacgtatagcttcttgatttcgttcttgtcggccttccgagggtcccaggtttcttgcaagaagcccacatcctttcctcgctcgagctgcttggcttctcgatcaatacgcccgaaggttgctcagtttcctctgacctttcagcgatcacgagccctcgccggtgaggaagtgttgcatttttccttggacttcggcgcagctgcaatgagagttcccaatgatatcctcattgcgtctcccagtcacagtacccagtcggcggatccctgatataccccggccccaatccagctcccgtattgtccctactcctcatcaaagagtcaaagaaggccatgtcaaccccttgaaaggcccagtcgtccactcctgccgtgagagcagggtaaagatacgagtcgtgttcaggctgcaagtggccagaaccatgttgggctgggagtgaagaaaagtcaggtcctccaacaaaaagattctgagaactttgttgactttgcaccatgttgccgtacaattgttgctcctggttaggtgtctgagagggttgccgctcgaacgctgactgcggcaccaacgtcgcagacgacggagcgtcaggtccagttaccgcggtggcggaaccagcggcgtcagatgtgaccgcctccttggaaatgacttcatcggtagccacaatcttgaccaccccatagtacggaataaacacacggaggacgttttgacggctcggcgtggtgacggactcggagctagaccggtgaacggcctgggtgtcgtactttcgccgcccgttggccgcgtcagcctcgatggccatgagcctgcgtatcagaccggcgctcttctcgcttaggcgcatccgcattgactttgttgaacgcgtcccatgttctcgagatacccctccaccaagcctaaatctccaagcctttggtgggcgagaatgctgtgatctgggggttggcaatgaccttgcagggtgtgccaaaaggagcgtcatggcagccatgagggcgtagaagtccacagcgcggcagcagaaaggcgacgttgtcttgggcccggaagaggacaaagcgggtgagtagctctctcgaggcggtgacgcagacatcgcggctgtaagaagagttgctcgggtcgagagactgcttactggatcgcagcaacatgtatggaagatgaagctggttcaaaaggttgtagtggaatacttgcctcatcagttgccacattctcccgagcatctcgctcacgtcattgccggcaccaatgagactgggcggcaaccaccatcttcccggcagttcccctgccatcttctgcaactccagatcaagggctttggtggatgcatactcgtggaagcttggatcagattcattccgctccaggatccgagctgcgacacccatctgaagacgttcgagtttattgacgggggcgtcgtcacccggcaggtggacacgtgaagccactgctgcttccattgcgccttgcggaaggccaagcatgagggacacaacagcatctgcacatacaagacgatgaaagaggtgttggggagccactggcatcgaagcgtcgagaattctcagaggccggtgctggtagcttcgatgaatacccatcaactggccgaccgttatagcgcggcggaaggccagccaggctcggcgtaggttcccgcagttcatctgaaatagaccctctagcaggatacaatgcaacgactcaatggagctaagcatttcatcgttggtggtaacgagccggattgccgtgtccgctagcctccgcatgatggtccgtggagtttcgcagtcaggcgggagatctgtgtatgcattcctgtgggtgtactgtagagacaggcaaagaacaagcatgtgtcgagctaccaggaccggatggagatctcggggcggaattccaaacacgacttttgggtcactgtttccgccgaggcctgacgcagggtcggcgctggtcaatgccaaggcaaacaagccagctttgtttccgccgagctcgtagatagtatcaaggtcctgtcgagatgggtatgccgaatgcagtgcttcggagagtcggccgtgcttgccatcgtcaggtcgtagcttggcgagacactcggcaggatttgggcgttgaacaccgagactttcatcttcgagatccagcccttcctgtagaagggtatcaatagcttgtcacgccagtcagttgcatgatgcgtcatacctgaggagcatcaagaataccaaactggtgacttgattccgagccagttgatccatcatctttgactaccacagaagcctctgcgggtttcaacagtgcctgcacagcggatggatcacctccaaccttcttgaccagctgctcaatcaacgtctcaacccgaatgattcggtctcccatctgacgtgtacgatccgctggggttgaaagttcctcaggaagatcctggcttctgcagtcggtgtccctacgatgacatccgatgcagatagcatcacccggagcagcaaaggtgcatcggatctttctccgcttgcattcccagcagctgtgtgtccctttccgaattctgcgggcctgcagtttgagtgctttctgtgtgtatatggtctgtggcatcagggtgccgacaggtgagcgagccgtttcggtttccatcttctcgcactttcgagctgagagctctatgggtgttgtaatgggatgtggttgtgctggaaggaggtgcaggaaccgtggtggtcggcgttctcaagtgtgtaagtgcaagaagcccgcaacggcggaggtgtaaaagagcagtttgtgattttcttccgccgcgtcggcggtccaaaacggcggtgtcttcagcattcgtaatcaaccccctgggtggttggcagcctactggtcggtcagcaacgacagcataagcagatgtgcggcacagcgggcaggagcctccggtgctctggatcggttattcccgtagatgaggttttgcgacatcaggatttggttatctagaattttattcgaagactgtcgtcataggagttatccttcgagatagaattctttgcccagatatttggccttgagaggtgttgccgtggcaacgctttacccctgaatcccttgagattcccatataaaaacaaattatccttcttctttttgttgtttgaattcattgattgttctatcattttgctaagatcgtcgtatcatgatcaccaattatatgccaaagcacacacatgaaacccccttttcgaatcgtaaagcccacccattatccaccctgattaaaacacctttctgaaaccccgtgtccgatagcccaattaatccaaagtaaaacgccagcccgcctgttctggcatatctgaaaatcaaaaatcaaaatcgtaaataaggaaaatcgtcctcacccctatgccaccgccccagcagccctcaaggtctctgggtttagtcttttccagctgaagaaaaaactcaaaacaaaggaaagcccaacggctccaatggcaatcgctaacgctgttttgattccggccatgtaggcgatcaaaatccccggtacttgctccgctgggaaaacggtcgtgattgcggtggcgcctgtgcccaagactgcaagtgcgttgacatcaggcgctgagatggccagttccttcatgagctcgttgacaaaggcggattgaccagccgagacccagaaggcaccaccaactgtttggaagactgcaccaaaagtgttagcgtgagaaacagagacaaaaaggggtatattcacaaagaacgatagcagtgacactgctcaaatcgtcaatctcggccgtcgcctggctgacgatgatgggaatttggaacgcactcccccacgcaatacctcccaggatttgatatccaatccacatgcccgccgatgacctaatgtcaagtgtgtacaacagaccagccgccacggtagccagcgctgcccctcccaccgctaaaggtgtagcatagcccgtcgccgaaaccgcccctcctcccacgatcgtcgctactgtgaccgacagaatcagcggcaggtttttcacccctgattccgtcggtgtagcattgccgatactttggaagtaaatcggcaggtaataaatgatgatgaaataactcccggcaaacagtaacgaaaacatgctgcaaacccacacctgcctctgcacgaatagccttggtacgatcatggacctctccccattataccactcccagacaccaaacgcgatggaaatcatgacgaatccaaccaaaagtccaacgaccttccggtgatgccatgcaagtgtctgcccgccatattgtagcgcaagaatgtatgtgatgacaccggccatgatgagtgccgtgccaacggggtccatctgcaaaagcttctccttgagagtcgcctccgccggcttgcatcccgctggggtccggaacaagaagatgatgatcagcgccgacagtccgccaatgggcaagttgatgtagaagcaccatctccacgtcaccctatccgcaaatacgcctccaatcagcggtccaacaacggcagcaacaccataggccgtgccaataatgccggtgaagactggtcgctttttcggctcggcggaaaaggcgatgagggtgtatgctccggagccgataccagccgctcccaccccggcaacagcacggccaatgatcagagtaggtgaattgggtgccacgccacagatcaatgacccaagctcaaagatgaagatggagatgaggtaagagatcttgagcggaaaatacttgaacaccttgccccacgaggattggaacccgccgacagtcatgaagaaagctgcgccgtaccaggctacgtcttcgaggccgttgaactcgtcggtgatctttggaatggcggttgctactattgtctgtttgacgagttagcatcactgagaaaggcacagtgtgtggatcgaaaactgaccatgtcgagagaaacgagaaagacgctgagaaccaaggcgatgatgatacaagcaaacgtccatcctgttgaatactctgttggcggcacatgtaatgacttccctcggctcctgtatttctctgacagacgtcccaggttggtggatgagtttggtgtggaaccactgctgaggtaagcgtgatagcgatttcttggggtagctggagtttcgagattgaagagggatgataccgagttttgcgatgccagtggcccatgtgcgtgtgtgtaggcactataaggtgccatggtggtgtttgaacgagcgacagacagccaaaatgaggggaggattcctaaaagactggacaattcaccacaggtggctaggagagagcgaaatacaaggcaatgtgacaagacttggcgaggagcaagtgatgccgaataccgagtggtaagacgaaagggcttgggaatcctttatgttcatgatgtccaagatgggaatccacactgcacgtacatgcaagacaccgattccgtggcagcgattctccgggaaggcgttctcggcggcaacatctcagagattacctcgtccactgcgaccacagtgccgcgcgaagagaggatggttcccaggtgcagaaacgcgcaccacatctgccgagaggtgcattttcgatgcgcataccagcagctacctgcttcatctctacttggaagattccgcagccgatgacgagatgtattcgggtcgggtttcatcaaggactcaaccctggtgcaggagtaggcgccggacattaaatcggggtgcggtttgtctgcagaacaccgctattttagtgcgagtataagccagacaccacaagaaagcgcagagcatctcaccttgcaattggtgttgttgtcttttgctgcaacattctcaccggttcggattggtgatgcgctgcggcgttgccgacgccacacatactttcttgaaaatatttgtggcaacattagaaggtggatgcatttgcctggaagatagagacctgcaccttccctttcctattcataggcatgcaccttccatctctgcaacctagctacttgtactaattactcagctcatgtgatcaatgaggacccccctcatgcaacttttctttcatcagtttccttcatgttcagagtgttcctattttcatccatcttatccagcatctcatcatcaacccgaatatcggcattcacaccgctgcagtcaactccttacaaaatcggtcttcatgttcatctcaagatgtcaaccgataattgatcacacgtcttcttctgaagagaacccacatgagcgtgtcgaaaatctgaggtggaaatcaaacacaataaattcaatctaaccaaattacgtacacccatcgatcactctattccatcccagctttgtgttcttccactcatcaagtctctttccacccgaataatttcactgaccaagctcttatcagaaaccatccaccccccaccacccacacctcactcatagatcacattagccacaatggcgaactcagtcctgatcggccgactcggctccccaacaacagcagtcgcctgtccaataacagcagtcggctcccccacaacggcagtcgcctgttcgacttttacaacattgtcaccgttcacggccgtgttctgtctcgcccgaatagcagtgataaacccatcagctacctggaaaacaggcacttcggtcacaaccggcggcgaaaccggagtaaccggaatctgggtaccaattaccacagagggggcattcggaatgacggtatcgatcggtgccggaggagcgtcgggaatagcggtactgattggtgccggaggagcatcgaggatagtggtaggaactggtgccggaggagcatcgaggatagcggtgctaattggcactgggggcgcttcgggaatgggaattgcggtatcaacaggctgaggcgcctcgtcgacgggaaaggcggtgctctcagcctgacgacgttcaacttggcgctgttggaggccgtcgataatgtcgatgaggtctcccaactcatatgtttgtcttttggcagggctggaaccgaatctcccacgagacacatcattcggaccggggattgtaccaccacctacccggtaggtcctagtgtccaagggcgagtcatccctcttcgcaggactagcgccgaatctaccgcgagagacgccgttctggcttggaataccgttgccaccacggtaggctctctcagaaagctgggtggaagccaggccaggctctgccggcagggctcgtgcctgggcaacgtggacgtcgagcgcggcgaggaggaggatgcagttggagatggtgagcttcatgttttcggagggatgaaagatcaagtggaaatagatcagacaatggatagcaggtaataaggattggaatctcaggccggcctgaagtagtgaagtttttgtgtagtgtttgattgctcggatgaagatgctgttcagtttgatattgacacttcacttgttggaacacagccttatatacattttcaaatataatgatcgctcgaaatcttttttacatgacaataggcaacagttccggaattcaaccttcccgatagttactttgtctgtcttgggagtcaaaactggccagacgggaaaatcaacggcaaacatttgacacgattcatcatgcagttgacaggagaattcaaggcctacggtaaaagtctcaagtcatctatgtttgcatcctaggtgcataatgcactagttgtggtcgtctagatctgaatgtaaatcccggcagtagtaggccacatagaggggtcagtcttgacctagcatcgcctcactactacgttttccttcaactatgaccaaatgtttgtacgtcaaaaagaaattaaccgacggggagttctaatggtctgatgtagatcgacccgtgtcggctcgtgaatatcgaactttaatgaaacccgggaatggtaaatatgggccatgttcgcggcccagttgcctatcccctataattattgttaagttatttgatacaaggtaagtaatattctttgtttcgagttgcaaagtgaagttattgtgtaaattcccaatcttttggactttctgctacactgacaatatcaacaatgaggactgaatcctgtcccatccccaacgccacgctgctaacatgaccgacaacaccaactttttctctacccattcccccaccattccataagcaacttgccctcctagaaaacttcttatctttctttacgccaaaagcctactccttcttcgacctcttactatcccccccctccagcccattcacctccccctccccagccccatcctcatccatcctatgaaccgtccccgccccaccacccaacatcgactcactcaaaacccacacgcacccaaccggccccccctcaccatccccctaccctcaacaatccacttcccctcttcataaaaaaactcctgcacattcttcgttgtnnnnnnnnnnnnnnnnnnnnnnnnnnnnnnnnnnnnnnnnnnnnnnnnnnnnnnnnnnnnnnnnnnnnnnnnnnnnnnnnnnnnnnnnnnnnnnnnnnnnnnnnnnnnnnnnnnnnnnnnnnnnnnnnnnnnnnnnnnnnnnnnnnnnnnnnnnnnnnnnnnnnnnnnnnnnnnnnnnnnnnnnnnnnnnnnnnnnnnnnnnnnnnnnnnnnnnnnnnnnnnnnnnnnnnnnnnnnnnnnnnnnnnnnnnnnnnnnnnnnnnnnnnnnnnnnnnnnnnnnnnnnnnnnnnnnnnnnnnnnnnnnnnnnnnnnnnnnnnnnnnnnnnnnnnnnnnnnnnnnnnnnnnnnnnnnnnnnnnnnnnnnnnnnnnnnnnnnnnnnnnnnnnnnnnnnnnnnnnnnnnnnnnnnnnnnnnnnnnnnnnnnnnnnnnnnnnnnnnnnnnnnnnnnnnnnnnnnnnnnnnnnnnnnnnnnnnnnnnnnnnnnnnnnnnnnnnnnnnnnnnnnnnnnnnnnnnnnnnnnnnnnnnnnnnnnnnnnnnnnnnnnnnnnnnnnnnnnnnnnnnnnnnnnnnnnnnnnnnnnnnnnnnnnnnnnnnnnnnnnnnnnnnnnnnnnnnnnnnnnnnnnnnnnnnnnnnnnnnnnnnnnnnnnnnnnnnnnnnnnnnnnnnnnnnnnnnnnnnnnnnnnnnnnnnnnnnnnnnnnnnnnnnnnnnnnnnnnnnnnnnnnnnnnnnnnnnnnnnnnnnnnnnnnnnnnnnnnnnnnnnnnctctcgaaaataatccgcgccccatcttcatcctcctcctcatcctcatccccttcccccttggggtcagggttaaggttagaacagtcggaaatagcctcaaacaacctctccgtctccgtctttggcctcctccccccaaccgtcacttcttcctcccgtttctgggaagcgggaataagcgtcagctcgaccgcatcccactcatcatcccccgacccgccctctgcgagctcaagctggaggtagacgctgctgaactcgcctattttctgcacagcgtggatgctgatttggtggtaggggattgtcagtccggcctctgcctgtggggagaagaggacgaggttttgggatgtgacgaagacgtcgagcgcttgttcgtaggttgttgggagggattcgggggagagggcgagggattcggggggggttggtcgggtggtgaggtcgagggggaagaaggggagtttgccgagttgggtgggggaggtgagccaggctttggtggagggggagtggtggtggaggatgggtttggttggcgagaagaaggaggttggggtgtgggattggtggtctgggaggggggtgtagtcggatagggaggggggggagcggatggtggtgagggacattttggcggttgtcgtcgtggtattggtgagggtggtattggtgagggtggtattggtgagggtggttttggtgttgtttggtttgcgctggtcaaagtcgcgaatgttgactttggggaacgcccgctggcaaggtggggagctagctggtttaagctgctggagctgtcaaattttggtggggtcaagcttgcgttatcgataaccttatcgagacgtccctctttcgtcatgcggcttgtgtggccaggagggttctcgcgtggccaacagaaactttggagcaaacgcgtggcacttcatacaagaatcgtgtcaattgatcacctcgagtttttttaaacagcaaacagaaattgccatcaaatgatcaaataaacgcggcgaatcatcaccatgcacgacaaccgtatgtcgtcctccgtcctcaactctacggaaacgcgctgactaacaccatcatccaaggctcccaccccttcctccaacaagtccccctcaccgtctccccctttgtcaacctccctacggcaaccacactcccatacacatacaagcccatgccttccgccctccccccatcagcctcgggcatcacatcagactcggccgctgggggcccagaaccgaaatatgtcgtctcaccgtctgggcacgcggcccatccaaacgatattatcgcctcttgtcgagcactgcgagatcacattgccaaactcacggctgatgccgaggcggagatcaaagcgatagatgagaggataaaggctgctgagctggctgagaagaggaggctagcacctggttggctggatagtgatgtaagggttcttcagccggagagaaagagtgttgcgcctgatgggtctggtatagagggcttttggcagttgagtcttggggaaggtggtcatggggagggaaatactagtcaacagcagcaagggcatgggccgggaggggcgagtgagatggcggtgccggatgagggggaggagctggatagggcttttgggaagcttgggatggggggcccgaagtgatgttggctagttatgatacatgatattgcttggatacgcagcgtgatgatgcgagggagggttcaaggctctaccctaaccctggcagcggtggtggagctaccccagaaagtccacagcttggcattgccgcctccctgttggacagatcagatacccaaaagttgcttcaaaatattctcagcatcaattttctctaaatctgcgcatccaccctcctgtccgtcatatcaagaattgatcagcccaaatttctgacgtctgatatacccaatccggttagcgccatcaatttaagttctgctccacttctccaaaacccgccgcagtcaagtcgcaaagtcgcgtctcccaaagcttgccagattctcgaccttttgcgacaacaccaccaccaccatcacaaccaccaacaaaacaaccaaaaatgggcctcccgccccgacgcgccccttccccctccgagtccggctccgaatccggctccgggtcagaatcctccagcagcagcgaagactcggccccacgcagacccctaatggcccgcccaaaattcatccccaaatcccaacgcaacaagacgcccgcccagctcgcccgagagcaagaatcggctctggccgccgccgaggaagccgcgcgcaaagccgccgctgacgcgttggtagaagaacaaatcgccaaggacctcctggctcggaaatcaggaaaaaaagcctgggacgacgacgacgatgaagagaataaactcgaggtggacgacactgacgatcttgatcccgaggcggaatatgctgcttggaagctgagggagttgaaaagactgaaacgggagagggaggcgattgaggcaaaggagagggagctggctgaggtggagaggaggagggggttgactgaagaggagaggaaaaaggaggatgaggagcacttgcggaaacagaaagaggaaagggaggggaaggggaaggtggggtttatgcaaaagtatttccataagggggcgttttataacgatcagggggctgaggcggggttggtggggagggatgtgatgggggcgaggtttgcggatgaggttaggaatcgggagttgttgcctaaggctttgcagatgagggatactgactaaggtcgggaagaagggggcgactttnnnnnnnnnnnnnnnnnnnnnnnnnnnnnnnnnnnnnnnnnnnnnnnnnnnnnnnnnnnnnnnnnnnnnnnnnnnnnnnnnnnnnnnnnnnnnnnnnnnnnnnnnnnnnnnnnnnnnnnnnnnnnnnnnnnnnnnnnnnnnnnnnnnnnnnnnnnnnnnnnnnnnnnnnnnnnnnnnnnnnnnnnnnnnnnnnnnnnnnnnnnnnnnnnnnnnnnnnnnnnnnnnnnnnnnnnnnnnnnnnnnnnnnnnnnnnnnnnnnnnnnnnnnnnnnnnnnnnnnnnnnnnnnnnnnnnnnnnnnnnnnnnnnnnnnnnnnnnnnnnnnnnngaaagatacctttgcaaaaggcgagcaaactactcggcaccaccaacacatccggcctcacattcaccatctcccccaacttcaaataccccacatccaacaccgccccgggcccaaccccatcccccctccccgtcttgggcagcttcttcctatccgtcggcgggaacagcgggaagtaatgtctctgctcaaccagatacctgcacgcccgttccaacaacctcggctcctgcggtctccccccaatcaactcctcgtgtctgagctcaaagaggacatcctggctgctaataccaaggacaatctcgttcatgctcagcgtcatggggttgcctattacctttgccgcttttggcaaaccgagttctttgcgggggaaggcgtcttgaggccaggacacgtgtttatctagtacgtcacgcaccgaagggatgaggaggatggtgatactcgggttggcggaagcgaggcggttgagggagggggagatgaggtatttgaacacggtggacattgttgctgtgtcggggtcgatggacgagaggtattcttctgggaggtcaaagtctcctgacgcaatgagagggtgttccatgtcgatgaaggggccggtgagaacgagcgcgtcgacgtagatgtcggctgcttcgttgcagagggctttgaggggttcgaaatcgaggttgtcgtctgctgtgtacgggccagaggcgaagattacgttcagaggggcggggtcggagtcggagtccattgcgtccgggccgccgcggagacgctggatatgagcgccgagggagtcgggggtggaggcggcgttggggaggagggggaggtcgaggatttggtggacggtgaattcgtgtccgttgctgtttacgcctttcagagcgacgatttggccggggaagaattggtatcctctgagcctggagacgttgagagggacgcggagaccgccacccattcggcgcgaggtttcgaggagtagggaagcggcgttgagtttgccttctgaggagtcggaggcgatccggccaacggcaacgatctcggacgtgctttggctggcggcgctgccaaaggcggactcttcgagcttgtggtgttgcataacgagggagacaaagtcgtctatccggtcgtcgagaatttcggaggactcggataccttcagggcaaggggtttgtaggccaatttcttctggtcagaggctgcggtgagcttgattcgggattcgctgaagggggcgatagggggctcaggcgctgggagctggtcgttgaggatctcgactgtctcgccggcattggctcggtcgttgaaggatgatggtctatcacagtcagctcctgcgtaatcccgcacacatgttggaattgaagctcacggaatagcacccgtagcgtcgagctggtcggccaacttgactggcgaactggctggctcagccttgacacggctgactgctggcgtcctctttggggcaaccttggaggcccttccagggcctggtgtggtgaggctatccaacattccaaaaacatcgccgccgctgactctgggggcccgtggtgttgatgagatgcccttctcggtcttgatctttacatgcgaccgactgtttctttcgagggtgtcatgcaagtcttgcttgaagtgtcgcagtgtctcgagagctgtttgtgctgcgtctatgtccatcttgatgcaatatgactcccatttgaagaacaggtcctcgactgacagctgatggaggcgcatgatggaccgcaggtcggcgacgacatcggcttcgagctccttgttccctgaaccgaactgctcgttcagctctgcgactatttctgtttccgacatgttgtaatcttttcgacagttccaattccgtggattcaatttgttataattaggtgtcggtgctgtgctggcgacgttgcttgcttttggttacctcgaccgagggcagttacttgatcaataattatttggttggagatgtcaaagtgggacgcgttcgacgcgtccaggaccacttaacgcgctgcggggcattctaggccgccttaactgggcagattgaacaggggttgcgctgatctcggcgctgaaaattgcgacccgctgttgggtgctcccgagccaatggcagtgttcaaacggtgcccgagatgcaattgagactgttggaaccggggtcttgggagcggtggacattgatttctggctgggtttccctatcaaccaactgtttcgttgccctctctcttgtttcttttcctttgctcttcagaacttgcctggcttttcttctgcagctccagttattgcaatctcgtctgtctctttatagacctatcctgccaactttgctgcccatacgaggcacacggagtaacggcgtcttggttgcccgataggtaattgtctgttaaattggggccccaccccttgccaactacttatacctcttgctaacctcttttcagagtctttgggcatacatctcaacaacccttccaagacatcaacatggctgaggttctcaaactaccattgccctttcccattgctggcagccagcccaaaccacgcccttccttggacgccgagcagcaaaagaagtatgactggcttctcgagcgagtgaagggctggacagagatcccctccactagcaaggctggccctcccaccgatagcgagaagttctggctgactaaggaatgcctgcttcgctatctgagggctaccaagtggaatcagcaggaagccgagaagcgtctgctcaagaccctcacctggaggagagagtatggagtggaggacttgacggccgaccatatttcccccgaaaacgagaccggcaagcagatcctcttgggctacgacaaggaaggccgtccctgccactacctcaacccaggccgtcagaacaccgaggcctcccctcgtcaggtccaacatctcgtctttatggtggagcgcgttatcgacatcatgccacccgggcaagaaaccttggcgctcttgatcaacttcaagcagagcaaatcccggtccaacacatcacctggaatcggtttggcacgcgaggtcctcgacattcttcagaatcactaccccgaaagattgggcaaggcgcttatcatcaacatgccctgggtagtgactgcctttttcaagctcatcacaccgttcatcgaccctcacacacgcgagaagctcgcgttcaatgaagacatgagcaagtacgtaccgacggagcagatgtggtccgagttcagcagcggcaagctcgctttcgagtacgatcacagtcaatactggccagctctgcaggaactttgcaacagaagacgggaggctaggtggcaacagtgggttgctggtgggaagcaaattggcgagtcggaggactacctggctggtgcgactgcggctgcagttggctctgcgacagaaaagactgccactgcacctgcggttgagggcaagacggccgagatcacagcatcagaagctgccccggctgtgcccgcaaactaggtgcgcggtgtcagagcacgtgtatagcccttcttgtgtcttcctggagctgcagtttaataaccttacgtagtctaatgcttcttttggcctttcacatgttttgataccggtgtccagctcggtgactctgagcaaggcgccacattctttgtttggttggcagcattggccagctaaacgagcctggttagcgggcagcgggaggattacgcggctggcagcgcatggcttcggagacatacgacagcacaattggtctgcatggtttccatctggtcagtactttcgaaaagataagaccaaagacgacactttattcacctatatatcggcagtgtagcccgtctcggtggtcgttgatcagcttaccctcaatggccaacaccagcctctcatcgatttacgtacattcttcgaccaccagccgacgcttgaaagccacagcggccggattcgctaatcaaacaaacacccttcaaatcccaaagctcagccatcacaatgtcaacatcacccccaaaaacaaccgaagcctggacttacacctccccctcaaccccccgcacagccctcaccctcaccacctcccaccctctcaacttccctccctccaactcatcagaagaaaccctcctcatctccgtctcccacgcagccctcaacccaggcgacatagtcagcttaaccgccatgcctttcttcctgcactccaccccctccgccgtcccagcctttgacttttgcggcaccgtcctccggtcccacaaccaggcaagattctccccgggggacaatgtaatctgcttcccacccctcccccacatgctcaagacaggaatcggcggtctccagaagattgtccccatcccggcaaaatactgcgtcagactcccccaaggaaagaaacccatcgacggggcggggttgatgcttgccggttgcaccgccttgcttcaagtccgtcaggcgggggtaaaaaagggggatagaatccttgttgttggggctagcggtggggtcgggagcgcggcggtgcagattgttcgtgatgttgttgggctgggggggtatatcgctggtgtttgctctggtcggaatgaggggttggttaggtcgctgggggcggatgaggtggtggattatacgcttcacaaggacctgcctgggtatttaacagagaggtttggtggggaggggaggcggtttgatcatgttattgatgggtatgggaatcaggagttgtataaattcttgtgctgggtttttgaaggaggggggggtttatgatgcggctagtatacacttacgcttcgtataggttgtgggatttggctggggtcggtggtgacgattgggttgaaatatactctggccgagggcgcagtggttgggggggacggggagggaggttcaagatttgtagtttgggtgatccggggttggagatgatggagttgttggcggggatgcttggggatgggagggtgagggtggtgagggatagtgtttgggggtggggggaggtgaaggaggggtttgatgtgctgatgggggggcatgcggctgggaaggtggtcattagggtgggagagggggaggagtgagttggggggtggtgtaagatgtgagtgagtttctgtagtggaaatacttgaaataccctgctcttggaggacatacctagataatggtgatgaacaaacccttccatcattttgactgtgaaaaacttgatgtcaggtgagatagatgcagtactctgggtccttggatgtagttgcaaaccgttctgtaggcctcagcgcatgctgagatatgcccctgataggtatctacctggccacgtcgtagacaaaataatacctactttaaatcagtaaaacgtgtcacagccataaacctacatctctttaaaggggaaatgggtctcttgtatatatcacaaggtctgttgaccatctttcgaggcctacttaccatcctgggaggcctgttggctacctaggtaccaattaacagataccggcatcgtgattggccccctcactcctttgcgaggctgcaaacgaggccatcagtatccgatgtctcttcttcaacacaacctctattctcatgtcacgacgcttctttttccagaattcttccatcttcaccgcgtccctcctcttgaataaagtattgaaacagactatcctcagctacacaccacccagcgtcatgaacaccatcctgtgtgactgcggcaagcgcgtagccaacgcccaagccctcaaacaacacaaactcgactccccaagacacaacacaacctcgtgcgaatgcggtgctcgcttcgtcacacccgaagcccgcgatcaacacctccgagattccccgctacacacacagaaagaccatcctcaaagcacaactcagagcccacacaacaacaacaacaacaacaagaagaagaagacctctgttcagagtaccccaaacatcccagcagaaaccaccacagtccctgctgagcccaaacctctgactgaagccaagactgaaaagcccaacttccaatgctgcggtaaaaagttcaagaccaaaaaagccgtgctccaacaccaagcagactcgccaaaccatcacggcgaaagcccaaagaaagctccaagaaagagaagaagcggcgatcgagtctgggccgcaccacagacatcgaactacagattccagtttccagagtcagacatggagtacggtgcttgcgacaaggactgcggctggtgcgggaactgcatgagaggccttgacatctgataataacaatgatgcttattcggttgcaaagtgtgtgtgtacatgcgacactacaccagtttttgcctcccatccctggggccccttaaatacagcaatatgtcctccttctctatacatctctgccaaaagaacaaaagcttgcgcttccaacatgcatcaaaatggtggtatagaacgcccaaaaacacccaaatgtttcccttgagaatgcagcaccacaaaaagaaaaaaagaaaagaaacgacccagttgggaatttttctaaccaaccaccccccccccccccccccccaaacaaaccaaacattacttttcataccccatatatacaccctcacccctcatcactcatcatttccccctttcacttcttcaccccctgttgccgctcctgtttactcataaactcatctatcggattctccctctcctccaccggcggcgtaaactgcctactcaaccggctcatgctcgccctcccaaactccgccgaagccatcttcctcacccccggcggcctctgctgcccactaccccccctccaaccaggcatcaacccccccccaccaccaccaccaccaccgctctccaaccccggcccgggcgaactcgcgctcgtcacagtcttcaagctcgccacatccccaaacccaggcttcctcccccccctctcatcatccccctcctccgcgttccccccaaccacaaccgtgcaactctcccctttctccaaccgattagcgtgcatccccaacacctccatcacaccctccatcgcctccatctcctgcgccagatcctgatccgtcggccaaaatgtcttcttcaccgccgcaactcccagctcaaaaacgcatagcgcagacagagcaagaaagtgaacaatccaccagtacccctcctttccgtaccccgtcaagaagttatcaccgacaatgtaaggaccgagcgacggcttaaagatgaccgccaacaagatgttccacagccaccacccaaagatggagagaaacaacccgacaaagatgattacgttcctgttcctcactcgcaaaaagagcttgaggttgataaacaccaccgccagggagaaagccagcgtgccgaccgagtagaggtctgtctcgactgggtagggcgcgagagtataaaggtagtaaacgcagttgaagatgatgactgattccgttattcccaacaccatccagtacacccagagcttgaaattgaaaccctgagatttctgaccaaaggagtagagttctggaacggccaacagggtttcggccgagaggtccgtttcgagaatgccggggaggatgacgcagagagaggtgaacagtgtgttgaagacggcgagggaggtggactcgaagatggaggtgccggtatagccgttgtagtgctggtattgagcctggatgaggtaaaagacgatttctttccaaaaggtggccaaaatgtactttcccgtgcgggcgtagcaccagcggccgtggacaaacagcaggcgtgacaagaagcggaattggccaatcgagtagtcagagatgcgggcggcttgggtgccttcgcggccgttgatgccgatgccgagatgggcgcattgaagcatggccacgtcattggcgccgtctccgatggcgagggtcactgctgagggaacttggcggcgaatgcatttgaccaggttagctttctgagagggtgaggcgcggcagcagatgaccgagtcgacgcgggcaacaaggtcgaagaagagcagacgaagttgggggtcgtcgtcgactatggtcaaggtctgtccatcaatgacgaccactgaatgaggagccatgcctcgactgacatcagtcaaagtagcattaatacggtcctgcaggtcgccatggctgacgtcgagaatgtaaacctcagagaagggcttgcaaattctggccgagtgggcaatgttgatggcagtctcgcgcttgtcaccagtcaacatccagactttgatgttggctcggcggagcttgtcgatagtctcggggacaccctgctggagcttgtcttcaatcgcggtcgcaccggccagctcgtaatcctgctcgataatctcggcggcattctcgatctgttcctggcgattgacaagactggtggtagcctcgagatagatctctttccacgccttgtactcatcctcttccaagtagcggtaagagtacatcagggtccgcaggccttcggtagcaaagtcatcaacatgctgaaagcaccgctcaaaaacggcaccctcgttcacagcaagttgctcgtcgaccatcccatccaaaggatcaaacgcagctaaccgagcaagctccaaagacctgtttcgcgccatggactggcgcggagtctgataggcctcttcattacccggcgcatccaagccatcagcttcacgccgagcaagccagttgtcaagaccttcagaaaccattgactttcgccaactgctcttcctgtccaaggcaagcgatctccgcatgagatccatgctgcgacgctgtgccgccgccggggtctgcaaactagcacgtcgctgaaaagccttctcttgctcgacactcttgcgcatgctggccctgcgctcaacagcagtagcagtctgcatagcaagagtcctctgcttcagccgaggcaggatcacactgtcggcacccttggtaaagacacaaatcctgccatccggcatgcgaagaacaatcgacatgcgcttccgcttgctgctgaactcaatcacgtccaggatctggtaagtctcttcagtgtccgcgccagtcccgtgctccattctaacagtgacagattccgtggttcttttgacgacaatgtatccaagctgtgcagcagccctcaccaaagccaactcgtcgggagacgcagcctgataatcgattttgccgttctcgtcctcctcgggaagacaagtgtggcaaagagccaaacaaaggatgaactgccgcgcctggcgggaaaagggcgtgttgggcttcttctgaatgtagtcaatcatctcgtccgtcctcagctcaggctgagcatttgtcgggcgaacagacgacttccaaccagaaaaggaaggccgctgggacatggagggtcgtccagatatggaagggcggccgccttcaggagcaacataggacacgtccatgtcgtgtagccatgctgtgcccgccacactcatcttgcggaactgcatcagattctcagtcagagtgcccgtcttgtcggaaaagacatagcccacacaccccagatcttccaaaatggtcgtggtgttgaatttcgcgggtgtgtcgttgacctcgtcgtacatctcaacatcatgaagcagcagaagctgacccagcttcaccaactccagcgagacgtacatcgacagcggaatcaacgtgttgagcgcaatcagcatcgagatgaagacgtggctcagctgaactgtctctccggagagatagaaagccctccactcctcgtccctcctccacatggtatacccagccgtcagaccgcccgcaagaacaaaaacaaagaccaccaaaagtagcacaatccgattcaacgaccgctgcatctttggcgccttcgccctaacattcttgttggcgttcatcctaatcttgcactcctccccggtattaatcaccagccccgtcgcctccttggtattcctgagcgtcgaacccctatacacaacctcattcaacgtcaacggcctcgtctccccacccaccgtcaccctcccctcataattataaagatcaatgttcggatcctccgacacgacctcggcctccaccgcgcccatccccgccacggaagcgcaatgcttcgccagcaacgggctcgcctgcttgctcttcaagttcgtctccccatccaacgccatggtctcaatatacgcaatcccgttctcgttcgtcgcatgcaaaagcacaatatccgccggcaccgcatcatccctctccaaccgaatcacatctcccaccctaatatcctgccactccgtcctcacccactgactcggcttctcctccaccacccccccttcactctccgtccccttcagctcaagcacagtcatctccccctcctccccttccgtcttcttgccccccctaaccaaaccgcctggtaatctccccttcctcccttgccctcccccagccgccgcctcgggatccaagacccaagccccgctcctattttccctcacgtcaagcttgtacctcctataatcatcccacccttccttcgccatgctcaaagccacaaaagccaacaacggcccaatagtcgtgtacgtccccgtcgtcgacagacccggcaccatctgcagaataccaatcaccaaaaagtaaaagttcgccagcttcttaaactggaaaaacaactgtttcggcaagaagctccagatggtgtacctgctcgatctaatcgcgttggacacatatggcttccccgttctctcatccttgaacggtttcctccttgctcttcccggggacagcaaaatgtggcgaccgtctttgctcggagggataggtttctggcggaggagggtttcgaggacgtatttcttgtaataaggggctgcgaactttttgaacgagtgccattgtttacgggttgtttgtcggtggcgggctttttggcgggagagccagtttaaagggacggaagtgtagcttgttcggggttctccgtcgtcgtcgtcgtcgtcgtcgggtgtggctgaggttgcgggagccatattgttcgaggtgttgttgttgttgttgttgtcgttgttgttgctgctgttgtccaaggccagctgctggacgtcggtgttgcgcctttcgtcaaatgtttggcgggggcgggtgagggagatccttgactcttctatgcgcgagacggtaggggctcggtaggcactttgggagctggtggagattcgccctggtggtagcggaggggagagggtgctgttttcctgcgcgagctgtgttggtgacgggccgagttgttgcgatgattcgagtttgtacagtcctgttctgactctaagcgctggtggcggtcgtcgtgaactgctgctgtccaaggagtgacgagctcgaggaagaccactggcgagagttgggggcgagctcagggatggtctcgtgggcgtgtttgtaccgctgcgagaagacggctcgcgaggctctggcagggagatttgcgggacactgggcgaagtaggcgcgggttgcgaggtctgtaactcgatttgctcaagcctcgtcctgagcgcctctgcggcgtcatggtggctccctggcgccatgccaccgaaatagtgctagagctgacgaacgacctgcgcgcgcaaaagacaaagggctcggtggaacaaagggattgggggaggatgaggtgggtgggatgggggcgtgtcaaggtgcggctggcatgacccgattggtggtgtccttgcttgtctaggacaaagggaggtgggaggatgctgtggtatggcaaggaaaaacgtgttgcaagcagtgaggccaaaaagagaaaagagagcaagtgtgacgctcggtagaaagctgggaacacctcgatgtatgcttggcggctgaaatgcttgaagtccgatatgcaaggatcccggctgcttctgtcggtcccacgtttgtcgcaaccccccccctgcgctgcgcgcgcgcgtgccgagttttgtgttgtggctgtgataatcagatgggtccagaagtcaactcagaacaagacaaagcccgatcctagaatccacagcctgacgttctcgccgtctgtcgtagtgataatgttgagaaagtgttgcaaaaaactgtctacaagaacaggtggcctgtgcaagtgattggataggaatgcaaccggccggaaacaagtcctcgacacaacaccattcatcaaatcaagaaaaaaaaagttggcaagtccagacaccgccgaggtcctcttccaagtccgcaccgcaacaagaaaccccactagatcatcatccgcgcaacactcatatccaccatccggccagctcgccatcatcgtccggccccgttctgttatcaatcgctctcctccgttccaccccgtccggccttttctaaaaccccgtctctcctacccagcatatgcaaagaaagtctactacacggttccaaccccaccgctcattctgggaatacacctccggttaaacctcttggctgatccgtacacacaacacaaagtggcaccccccatgccacccccagctccggtatccattcaccgcattcgagttgcctgtttgagctcccgtataaaaccaccacctgaccccaacaacgccacaccacatcttggattgcggtgtgtggtgtgtgtggtgtgtgtggtgtgtgtagtgtggacccctatcctcttcttccaagtctgaagttgcagcgagtgacagacaccacctgtcatatcaacgacatgcaatcgtgtccatggctctggaaccttaaagatgacagttttgacaggtttgacagtaacaagtttaaacctcccggctgtgcattcactcccaatctagcacccattgctaaatccaacctgacatccatcaaacctgtcagagaccggcctagaacccaaccctatatagtaccttacctacatagcagcggcaggcaaaaaaaaactaaaaaatgaccttacatcagatctcacacttcatgcaaaggggggcacagtgtctcccctcccctttccatccggcctccaacagctctgctgtgccccaaattatgcaaccgagaaagcttgtccagccttaatcatcaccaccatcttttccctttccctctccctttccaccaggcaaaaagacatcaccagctggctggcgacacgcgaatgcaacggcgcgattttatttcttggcccctccatcctctcccgttgttccagagccagcgcatgcgtaactcatccgggcggctcgctgcaggtcatctgcatctcatcccctctcctccgggcactgcttggactcgagggatgggagcttccgtggtagggccttcacgaagcttaccctcctccccaacctaaccccacgcttatcagccttatccactgctgtcaaagcgtagccttcatcacgtaatgccgttcctatctatctaccttgtaatcgtgagatcttgttagacctatgatccattcacatggaaagagcacaaagtcagtggtattgtgttttcaattaggatcctgccgtgaagtcataacctaacaccccacagcaccaaaatagcagctgaatagcaacaaagtggcgagtccattcctatatgtatgcacaccactccgggaatcctctctctctctctctctctgtctctccatccatcgagacttctttcaccccttctctcctctccccttcagtccccggcccggcctctggtcctgctctgtctcttttcctctcctgatcccgccattttgctatcggcgccttcccaaatcaactccctgttcccgaatccgccttcccagttatacgcagcgcaagaaaaagccccagtattagaacctcggtaccagataaatcagcctcctgggcctcgccattcatcgcttttctcggagcccaccaggttgttttcctggcagaccacgagctcaaagaaaacaagaaaaatatcggaataaataacgaaaaagggaatagttattaaagcctttcccaggaccgctgcaagacacaaaagtcctcggagtatcgaaatttgatggacgaagaaaataatccgcaaatcaacatgacgaaaacgcaacgaagtgggatgccaaacgagatgtgaaaaagtccggaaccgctgtgccagacgagcacgaagagtgggtatcgtcatgcaaagtcgtggctaaatgatgaaatgggacaagaatgaaattcaaaatagatttcgatggtggggggtcgagtttggcagtgtagatcggagatgagtgaaatatgtcgtgaacttttggtgtgttggaagctaggaaagataaccacgaaagctccctggtatgtacaacgaaaatcctctcaaaacgccgcagaaaaagccgaaccgaaaaccgtttcctattgggcctggacgctttctggcgacagagaagccggatccacgtcgtaatgtttgagatccatgtactggttcagctctatctcgctctggctctgctccatgaagggcgaatgtgggtgaagcggcaacgtcatggtgtgcttgttgcctgggtacatgtcattcatactgccgtcatcggaaatggccgaaccatcgcacattggcggcatcgacatgggaggagattcgccgacaatggccgggtcgggatggttgaatgagagcggcgagatggaaggcggaggaacacccaggctggcaggattcaccatgggcgagaaagtaccgctatatggcgtgaagctgccagcaggaagaccgttgggctctggagcttgcgaggcaaagtagttggggctcgagaactctgatggcgagggggctgttgtcgcggagagaggatactggcgcatgtccagactgccgaaaccagcacgggtgtcgatccgcagatttggcccgatgggaccaagcatgttgggctgctggggaattgggctgaagatgtgtggattctgcgtgtgtggctggccctctggctgagtgatgtggaagctcggggggttttgcaaaagctgcatggtctggaagtcgatgggacctggcacactgcgactacgctgtctcttgtggcctggcccacgcatcatcatggtgtgatgttgagcagcaattccccactgggtttcctggaacatgcccacatgcggctgagcaaagtttggctgagaagagggtctggcctggggcgacacgggggcagacatggagagcgtgtggagctggtcaaacatcgggggaggaggaggaggcggcgcggtatgacggtgcatgaacgactccaggctgaccaatttggccaattgaccgctcaaagccttggggttaccaccgaggtggtgggtcatgcagcgagaagcttgcaggtcttcagtgaagtcattcacctggatgaaggtcgaggtggtcgccgagtccatgtagaagaagggagcctcgagcagctcaatcgtgattccagcgtggtgatcatccgagttgttgaggtagatgttcttgatgtaggagaatgggtactcgatcttgtagccagcctgctcgttgttgatgtagtaggtcatggtgcacttgtcaggggagtagaaaacgatgagatccatcgcattctgcccaacacgggtccatcttccgatggtgagcgagcggcagttgagatgatgaatcactgaaagcaatcagtcagctcacgtacttggctatgccgaattagaaaaacaacttacaaactttgccctggccaccctgctcggcgcccatcatgccctggtgtccataggggaacggacccgggcgaccgaagaagccagggatgctctttccggattccatggcttgcatggcaagatattggcgcatagattcaggaatcatggtatccaactcctcgccgctttcgaggctcttctttgcgagcatcttgattttggcacgtctttgtgagtggttagcgaagattcgaactatcgacaaaacacacacaaaacttaccggttctggaaccagatctgaacagacctctcggtcatgttgatttcctccgctatcctctcacgaacggtagctgtgggtgtgggattcttgttgaactcaatctcgagcgtggtcaattgatcttgagtggcgcgctgtcgtttttggttcttctgctgctgggtgagagtgctcttgcggggcgggcgccgcgaagcgctttgcccgggcttcgtctccatcttcatgtccttggtgggagtggtggcattagatgctggcaatgaggatttggtggagcatggcgaagtcgagagctgaggagtgtggagggtcaggccctcctcttgcttgaccacgtcggtagccatttcgggcccggtgatcttgctgaattcttcttgttgtgttgttttatcgtccaaggggtatcaccaattaataagggtagataaatgtcgcgattaggcaacgatcgcagtgatgtcgtccaaattcaattccacctagattgttgcgcagatatcactcggcctaggcggatgtgtcgagatggtgcgatatttttcaaatcgtagctcggttgtctggtagggaggtaggtgtagattgttgtcgcgactcgacaaataaatgctggaaaactatgatgggaaaaaagcagttgcaaaggagcgtcggtcctgaaccaagaagctggagcaggaggaggtggtaataataatatgcgatcgcgttaggtcgtaggtagtagtagtactagtcggtcggcggcgatgatcgagatcgtcgtcggcgagggcgagggcgagggctagggctatggtgttggggctgcgaaggcaaaaatgggacccggaaggagtgaacgggtcgcaatacaattgaattagtttattctaaagagagtgactgtggtgagaagcaaagcaagaagtgggggggaaggagggaaggagggaaggatgggctgccgagcgagcgacgtggtgatgtggacgattgaggttgacgaaaagagagactggggaaaaaaagagcagcacggggacatggggcttcaagaaggaaaagcaaaaaagcgagggaacagagagaggcccagcgtcccactcccacgcactgggcgggtctggcggcccctcgcccgtcaagcgctccccagagcgactgtccagccaatcgcgggacaccagctgcagccgtacagtgcgcgcgccaactgtgcacccaccgcaccacgaaccaagagctcactcacacccatcatcggacctgatgagggtgaccacaccaacaacacccacccacgccgcatccaagtgccagggcattctagtgtactactttcttaggtccggtatgtttcgttatttcgtttctctgaatccaagataactgttcagtccacagcaagaaaaagcctgctcgcttctcggggccagggcttttactgttgtatgtatgcagagcagtgaaacaagtgcgacacgatttggaccagcttctccgcgtccccccatccgtacctgacgcgaagccagcggcacctaccaggcactacggatacctcgacagctgaccagctccgagtgtttgcctcagtgtctaggattccgtttatcagcccctttcaccacactcaattctcactggtttcctggtctgggctctgcgaagggcgttctggcaccccaacgtgcccaagtaggcatggccagcatggtggcctggtcttaataggggtcgttctgccccccaggtgcccagcaacccgagcctcgattccgatattctacactctgggccgctccaggccacatcaccgctctgccaggacacttaggatgagctacctctgcctcccacgcaagggacacatcgagagctgtgtgtgctttgctgccgttcgtcacacagcgatccgcagacacgactcgagtcaccaaacactgcaacccgatgtgaagctcgtgaaccacaaccccgccagtcccttgctgctgcccacagtttggcgggtcctgcgggtgttggtgcgtggccagagcatttctcaacggcgcactctgaccacctctcaccacgcttgtcctctttggtctctacccgacaaggagttcacgactcaatgaacaacacaactttcgctggaataccgggctcagggccattgttggttgccgatatcttctttgaggtcccagaaacatcatcctcgaccgagagacccatttcaagacaacctgctggaaatctgtcggtgttcacttcaaaaggttcggcgcaacaggtggaccaatcacaacctttctgttccacacttgcagttgggggttaggaaaaggggaaacagcagtgaccagcaccacgccaagtcgcgatcccgtacacagtgcgtctgtcgggcagcgagcagcagcgcatcgtggagcttttcggggcctgaccggccatccggcactggccctggaaaggacggccaaagtccccggtggtgatcatatcagaaccacggaaacaaggatctgataacctccactaggtacagttctgatacgaatatatatggaggagctcgacggatagtccatggcaacagccgtgtacaagagtctcctgtgcttcatacttcgactgcccccccaccttggttcggccggtggtgcttttttcctgatgtttgcagagcatcgccaccgcctgtggcacaatgcatctgctgttcctgcagaagcgcagtgtttccctcgacactgtgtgccaacctgccgtgttcctgcgttagtgttgctgttcctgcggcgccggcgtcagcagcagcactcctttttgtgtgcagtaggacggagaatcccacgagtaggtagacgctcgattcggcaggagtgtggtttgcgtctcccttcggtcgcgatggatcggattgtgtggaccattaagaaacaacgcacagcagaacaccctcaagccgtactgacggtcccgttcgacctgcctcacgagttatggaccgacctgtaggtacggacatatgaccaaatcgtctcaaaccaccggcgtaccaggtctgagattctgacagtctggcgtcttatccgacagatgacaggtaggtacagtagttcccctcccaaagaggagttttcaagaggggaacggcgttagcagctggctgtcggaatgcatgctgtgcagggctgcctgtggaggatcaagaaagtgacccagaaatagaaaagaaaagagggaaccccattcctgtcgactccggcattcgcccaccacaccatttcaagcctcttgctccaaccagcatagatagtcaggggcatgcgtacaacaacatacggtatatacatcatgtacccgtcaattctcggccttggggaatagctgttggttccgagactttggagatctggacagcgacacacagacagcagcaaagcagatccctacgctacggtagtgcactgtgctcacactgtcacactccttttctctcaagtcagacggtgtggttcgccccactttacccctgaagatgaccaaggatctctggccagggttcccgacagaacacacgtgtaggtcaggtcctcctcccccccatcggacgaaggtcgcgcaattggtcggcgcgtccaagaaccaggccggcgcctttccccttttatgcttctctcagcagttgtggcgattttacccgtgagggagaaaagaaacgttatcccaagccaagccgccagacctgctgccggttttgggcttggcgaggagaacagggcaatggtaggtagcatcgtttcggtttttgcggaggggtttctcggcaactctggagcacgggctcttcggggtggtcaactcacaacttatgtctatgtacacacagatatcatgctcttcatcatgttgacatgctttcctaactcaggatctcttgctcaacacaagcggcacgcgcttgacaacaagatcggtgggcagtcgtgaggctgcaggcacaggttcatgcgctggaaccggaggcagcctgattggaggagggtcgacgtgttgttcatgcataggtggtgagaaaggcatggcggccccccaaaaaaatgactggacaaagtcagtcagtttcttccttcaaggcttccaaaagtaccgatctttgaagaacatctataaaataccaccttgtattggccgttgaaagtcaaggaaggaagccataagggggggaggcatcacctgaaaaacgttctggaaaccccgcagtccaatcggccgtgggggagctggagttgtccaagacagtggcgctcggtgtcagccctgaggttggacagcactctggattctgcgccgtcattggacgccaagagacgacgcttacagaaatccggtaaggtgttgagatggtgtacattgccgacggtgagggcttcttccctgttgatggtgaccacttgtaagtcaaacatggttgtgaagccggcgcttggttcaccgaattcaagcctcttcgacgactacttcccgctcagcacggcaggctgtgccgaaaggcggcttggaccgtccctccgcccattgaaatcgcggttgagtccggaatctgaagtaaactaccgttttgagcagctccgggggttggacgacacaccctacctaccctgtcaatatcgggaacaggttgtgtatgtatggacctatcccagataacgctccccttcgatgctgttttggatcgatctattattaaaaaaaccggctcacttcaacctggtttaagccatcaaccaccctcttcccgaaccctacaaccccttcaacacctgccacgtcaacatcagaatcatgcaagcggcaggataataataattctgtaacagaacaacagcataggtaacaagaaaggcggatatgcaccgatctacactgccatttgattgctaccttgacctgccattgttgggaactctctgacataaccgaagagcgttcttccccacaaaagggaacatgctgcaataatgcctttctggcgggcagaaggagaggggcattgttcaccgtctcggcttggccttctacacagggttgtctgccccatcaatctgtaacgggaggtctaacctgggatcggaaggtcagttggatgtttatgtgtcttggcgggggatatctctgacaatgtatggggatatatatatcatatgtggtgatgtatacagtaccatactgtgtttctttaggtgtggatattctttggaaaagacattatcccggtaccggtatgacctcggcaaagtccagtatagattccgggtcgctatcagtcctcaagtcgggtcgagattcaaccctctactacccaacccaagacagctctacccaccaccacagctcacagctccctcataacctcctccacaacctgcttagccatcctcttcctctgctgctcgggcaaaccagcactcatatccctcacagcccgcaacttgaccatcatctgctccaggctcctgatatcatcatccccaatctcttcctccccttcctcctccttccctttcccctcccccgtggtgtcaatctcctccccaatctgctcccaaatcgccctcttcaacccctcaaaatcctccctgtcatagccataccccaaccccttggggtcaaactctttatcgtcatcctcatccccctccccaaaacccaaaccatccccctcctcccctggtgcccctcccccagaccaatcattagcctccaacgcctccctcaccctcgcaatccccatcctctccccaaactcattcctcttcccttcctcctgctctctgcccttggtataaaccacaaactccaaccccgcctcggcagcaacatcctcccactcatccaacacgtcgtcatcccccattatggcctgctggctaacaccaataacaagcccgacaccatcccactcccaccctcccaacccttccctgaccaccttcccaacctctttaaccaatctttgatgctctgttaccgttgatgttgatatgctggaagacaaacaaggagagagctcgacaacaataataaccccccccaaaaccagcaacacctcctttgcctcctccgacaaaaacgaacttgaccattcctgcggagaagagacaagatcaagccagatggggacagaggcggtgtaatattgtgtggaaaggggtaaaaggtgggttgtacccgcgagggagggggtgttttcatcatcggttgagtctgatgggagggggtgggagccggtgagttctataaaatgttaataactgtattggggagtgaggaggaggagggggtgagatctgataaacaggaaagcatggattggaaagatatcaccaaagcaccccgcaactatgtggttgagaaagtaaggaaatgtaaaatgaactaacctttgataacagcactcaactccccagctgactgcgccaacgacacagcgaggatccgtctagggtgtgggatttccttgccggctttcttcgcgggggtcttttcgtttggggcgctcattttgccggcgtatagaccaaactgttttctctatgatgcttggagtaagaacaatttgagccgtgatgagaatgagcgagtgagcgagtgagtggtggcagttgcaaaagggagctttggctcatggtggggcaagctgagagctcgccccaacaatggcggggtaggaagcccattctcatctcactgcccgctcatacaatgtaagatctcaaaacataaagacgacgacgaatagtatttacgttgcatcattcctcagttcaatgagaatatttcttcaagtgttcggaaagaatatcaaacacacagacattcgcatatttttgctgcctcttggtggaatcaaagtgagacgtgatacctccagcaactcaaacagacggacaagcacaaactgtaactggcatctcttgactgtaacagcaaaatacacatctatcatgctcgctatgctctagtcctacagtctcaaccccaagaccagccagcaagcaaaaagccataccaataccatccatcccttccccctccaatccctatcatgcaaagttatgctgccgctgttctggactagtcatgtccacagatgctcgacaagacaataccaattatccccttttatgtacaagagttccaaacacctcacgttccttgtacccttaattccgaaaaaaagcaaaaaccacagcatgcacacaatcccagtccaataatggttaccaacacccttcttttattgtgcttctaacctttcacgccgtgttcctcctcttttgcaccccaattattcttccttcctcatatatcatcctcagaatagctttctaggcagttgacccacccggttgctctgagttggccgtagcagtggttccgcttccggcctgggatcctgacgatgatgccacaacctcctcctcgtcatcatcgacatctaccagctgggtggtcttgaatgccttcttggcagcagcctgcagcgaggtgaaatcaccgctcatctcacacatgctcctaaaggtaccgttggccttcttcaggagcttgtatggatggtcgtattcgacgatctgacccttgtcaagaaccaagaccttgtcataatcaacgattgtttgcaggcgatgggcaatcgtaatgatggtgctggtaagctcacgaatcgtgccttggatggcggcgtcagtggcatagtcgatcgaggcagtggcctcgtccatgaccaacacgctggggttcttgagcagcgcccgtgccaggcagagaagctgacgctggccctgagaaagattgttgcccgactcggtgacaggagaggagagatccaggaagatgttcttgttcgtggccgtgggcggccgtgatggctcctcagaagcagcgatagactcgacggcggtcgtggcgggagggataggtgcagaaccaagagccatctcgtcagggccgatgagctgtacacggcggagggcagcaaagatctcggtatcagtgtacgagtcaaacggatccaggttggttcgaatggttcccataaagagtgtgggctcctggggcacaatggtgataccctcacgcagatcgcgcaaaccaacctgaccaatgtccacaccgtcaatcaagattttaccctcatcggcttccaaggcgcggaagatggccagtgtgagtgaactcttgccagctccggttcttccgacaatgccaatcttctcacgcgcttcgatcttgaacgtgaggttgcgcagaacgggatccagctccttgcggtaccgagtggaatagttgatgaactcgacggacccctgagcgggccagttcttgtctgggcggttcttctccacgatggcctcggcttcctgctccacatccaggtactccttgatacgctcgactgagttcatgttttgctcgttcatagcataaagacgcaccagccaaaggatattgtcagcaaaaccaatagcatagctcagcgagataccagcagaccctggatcgacctggccaaggctgatgataacaaatacaccggcgaagaatgcaacaaagtcgcccagcagatcagttctgaaggcgagccatctgttagcggcccaaagatagatgaatggacgcaactgcttgttgattctggcaaggttgtctctgatgaagcggcgctcgtcaccgtaggcccgaatggttgtgacaccgctcagtgtctctccaaactgctggaacagcgggcttctttcgacggattccaaacgcttcaggtcccgcgatgagtggaggtagaactggccgaggaaaacgtaggcagccgtgatgaacactcccggaatcaagaacgctggggtgatgtaggcaatcaaaaccacagtgacagtaataccgagaagacaagccatgacgccaatagcgataggagccacttcctgatccacagcttccagatccttgctgaatcggttcatgatctgacccagaggggtaacatcaaagaacttgaaccttgctccggtcaccgccttcatcaaacgatcatgaagcttccaggaggcagtcagagagccaaagaagatccaaagatccctcacaagcgccgcacaagcaccagcacctccaatcagtgccagtacagttaagtagtagatgacatcaacatccttattgtcggcagccgagaacgtcgtgctatcgcccttggcgtagttagcaatcgaagcaaaatacgtcggcgacaaggtctgggctgagtagctgtaagagctcatgctgaaccgggcggaagcggtctcgttgagggtgtactggttagcccattccttgatccacaggttggaagcaacaccggaaagttgttgcgccgagaagacaaggccagccaagagccagaaacccaagccacccatggaaccaaggtacagtttcatcacaggccacttgaccgcaccaacagccttggtctcttccagggcatcctgcttcttgggctccttcttgggcgactttggcttgctcttttgtgagcttctgtcagcttcgttaagcagggtatcgccactctcctctccaacactggatgggacacgagagggaacacgagacacgtgggcagatcctgcggtagacttgggaatagcatcttctccgagcttgcccgcttcgatcagctccttgggggtaccctggcctgtgacacggccgttgctcatggtcaagacaaagtcggcaggcgggacgcagagagggatgttgtgtgagacgagaatgcaggtgcgatgtgccatcagaggtcccatgatgcagttggtaaagatccactgggcagtatgagaatcaacagcgctcaggcagtcatccaaaagcaggtgcttcgagttcgagtagacggcacgggcaagcgagatacgctgtttctgaccgcccgaaagggtgatgcccttctcgcccaccaaagtctcatcaccgttgtcgaggatctccaggtcgtgttccaaggcacaggccacaataacgtcgcgatatctctcctcatcgaatggggcagagaagagaatgttctccttgatgctagcgttcacaagccaagcctgctgggcgacgtaggcgcatgtctcagcaagaccggtttcgggatccggacgaacgtcttcacggctgcgaccaccgggaagaagaacacggccattcatgatggtcatctcgccaagcaaggccatcaacagcgaagtcttgccacagcccgtaggcccggtgatgacattgagcttgccaatcttaaagtcaacatcgaggtcgagcaggcggaacgccatagatccatcgtcttgcacagtggacttgctaccccagatgaaagtggcgtttctaaagccgatggctctctctccgttctcgtcaatgttgtcttcacccagctgctcaaacttctcagtctcctcctcggagagaaactcctcaatacgatcaatagagacctttgactcctgaacgtgggcgatcatgtcaccaagctgatcgagggggtaccggagaagcatgaacagagagatggcggtaaaggcgacggagggatacagaggcttcttctcgatgacggtgtagacaaagaacgagaagaaagtgatcaagatggggacggtgttccagacggccaccgcagcagcccaaagcatgaacctcttgcgcaaagcctgtagctcagctttcctcttctcgtcaacgatcttggcgaaacgatgctcccaggcaaagtacttgatgatgcggatattttgcaggacctcgttggtcgtatggatacgcttgtcggtggcgctcatgatcttcttctgggtcttgttgaagcccttgccgaaggcaatgttgattgggagaagtagagccatgacaatgaagccggggatggcacttagacccatgacctggtagagaagaagaatggacacgatcagctgagtaggagcagacgcgaccaggaagtgtaagtaggccgtgacctcagacaccttgaaactgtcaaccgacatcaagttgatgatggtgccgttgttggcctgctcgtcagcgtcggcagccttggcgtccttcttggaagcatcagcctcctcgtttgcggtagcctggctgtccttcttcccgagccccaacagcctcttggccttggagatgatgccgtccttctttggggtctcgtccttcttgtcagccccaagcgcggagtctttgcccgcagctgcctttctccgcaatgccttggcataaatctcgccgaccaggatagctcgaatgttgatgcaaatcttgcggccaatccacaaggcctgcgcatctccaacagaccggatgatgtccgtgacaggaagtaaaataacatagagccacaggacgttcctgggtgcttcggttggattctcgacgtattccaaaatggccttgagaaggagagtgggcgcaaacgtgaagacaccagacacgatggcccaggcagcctgggcaaaaagcatccccttgaagaacttgaccaaatggaaggccagcgaggtggtcttcttggcttggcgataagctgcgagaatggcagcggccttgtccctaggaagcagattccagactcgtttgagctctagtggttctttccagccatcccacacgatcgagtcgacccaggagaaggtgtagtgcgagaacagcgaagccaggttttcacgaccgggcggaatgccatcttcccactccagaagcaccgttttgttgcccttccgggtgctgatagccatgccaaaaagaacagaggtcaaggcaaactcggtcatcaccagaacctgcgtcatctgagagaccgtgtgaatcaagactgatcggaagagaaccagggcgaagagccactggcagctgtagatggcggccgtgtgattccacaacctcgggacccgccattgggtatttcccaggaaaagtcggagagttgcaaggagcaggacatagacccagacggtcaggccagcaataccagccaggccgttcttgacctcgacgtcgtacaacaatccgaccacactgacagcgaccaggcctgcaatagcaagctcctccacgaccacagagagagtctgcccgggtggtgtatcagcttgcacgatggatcccttggttgtggttttgaccagcgcaagccggccgccattgatgaccagaccctcatcgtcgtcgctttcgagtgttggctcttcatcgaccgggaggtctgtgtggttcggaggcgaaatcggagtgacgccattggtgagaggttcgtatcctcggcttcgttttaacctgacggcgcggaaagtgttgtgcagagcgagctggagaaacgagattcctattacgattaagggcagcaagacactaagatagctacaggttgaagcgagcaagactgtcagcgattattcttttttgacggagtgcaacagtagggacctactcctgcttgaagcattgtgtaaaatcgtcggtccgccatatgggccacgagcatgcggcgaaagccatttcggccgcgttgtcgtggcgcaaccacgaaatcgtaatgttggtgactgtctcggatacgtgtgtctgtcgttcgtcaattggaaccagacgtcggtgttgcgcgggggaagacgtctgggaaaacgtcgttgattggtggtggacgggaagaaaacaagaaaatgggaaatgcttccctctgagatcgccagcaatggggaaaagtgagaatcctggacgggtccagcggcggtttaaacgctggaactggaactggaacttcgttgtcatttggcactagtctggtggggttggtctggggtggtcctggaaaaaggcagctgcaatggtaagcaaaactacctatcttccactatctcccacacacagcgcatgtactgtatctgtccacttccgcgagtatagctatatcttgaagaggtatgccgacgacgcacgggagcacgcaaaggaacttgagccatccaccacgggcgggaggggtcataggttcgtagccgggccgggaatgtatttcatgggcaggagatctatacgcccacctactgagtgatgagagaggggtcccgtgcaacagtcccgacgggtttcagcaaaagaaaaaacacaccggccctctgactgccgataaataggatagcaatatcatggtggtctgtggcgtcaaaggccgttctctgtcgcacttgcagccttcttcgatgatccagaagctgagccaggtggggagcttaccaaatgagggccatctatgatgtcagatgttccctgcaacccagcagaggttcccgccgagccgagtcaaggcccttgtctttttttctttgccgtagaattttaggattacacaaagtattgtgcgaccattggtgctacatctcgtgctctgctctgtgagtctgaacatctagagacgactacctaggcggtgacatgactgttcggcctaggagctgcttacatatgcacatagatgcttggtgcttacatcctgcctaatgcgactccgtccgccaaccagcaacccctggtggtcgcagcgcgaagctttgcgctaggaaggccacctgcatccgttggtggggccgcaaacgtcgagaagctcgatttttcatccgttcggccagcgttttgcactctgccagagcctccgttacacacaagactcgagaaagatctgatatataatatatgagctataacatcaaactatctcggtaccctcaccgttgcttctcagtacagaggtatcatgcgaacaaatgtatatgcaacatcgtctcccgtccgcgcaaaaagaatactcatccaatcgaccgcgagttacttgcatatgagcctctcaacgatctcatcatgatccttctcaccaacctcatcctctttttcaaacggatctcgttcgccgacatgatccttctcaccgccgtacttctttttctcatagtaatcctcctcaaggccatcacttttcttaagctcttcatcttacgtaccttttcccttcttctcactaccctcagctcttcatcaacctgctctcttgtcttgcggccacagccctccagcgcagtcaggatttctttgctttgcttctcgtggtctttatcatcgagccagtgctgtgggagaggagcataatttaaatcgccgtaatttgtccgcaacagccagagggcagcgaggtcaggatttgtctgaccacgccttgggaacccactctctccaggaagtttcattgcagtatgccctccttctgtcgttttctatgacgttccaggaatatccatatatacaggctttcaagggccagtgacgaagaatagaggagtagcggtctccgccaaatttgtcatgagctgtcagagttgcttgttggaagttgatgatcgcgaaggtcccgtcctttctgacgagaattgtcgtgtggcttgaccttactgtgtataatatcacaccaccaccaaagctcgttgtcggcatcgataagatgttttaaaagttctgaaggcaagggcttgccagtctttctcttagattcacggatgagtttcgacatgggctgggcgtcgtcgagcttttcgaggagcatcatgcgaactggttagtagccttccttggactcggggcaaggatggtccatgatccacgagccgtagaatctgactgtgcctctggtgagatctggatgctcttgggctgcttcgcgaaccaaggagtaggcctctgattcaagcgcgtagtccatatcagcccggggtggcgcaatccggaggcaggccatcccccgctgggttgcgtacaaaggtatcgtctaaggagatgaggtaataagctgcatcgtagatcttggcaacacattcccgggggccttgttccttttctccaggtagttgaactctttccgtcacggcgattgggccgttgtatcggtcatcatcaagagggagcttggggtccttcagtgcaaggctggcacgggtctcgttcgaataattacacgtccagccagggatgtaataatcggggtcgtattcgtcatcttccgtgttgtcttctttgttgtccttcttgtcatcttccatatcgtcgtcatcgtcctcgtgccccgaatcctcgtcataatatatgggctttggactaatgacaacctttctgatagtaaattcaaacgtctcgtcgccaatctttccgctaatgggtgggttgtcaagagcatattccacccggtctactcgcgctcgaggctcacagccgaactctccctaattgttgtattctcgctcttcctctccatagctgtggtaatttaccactccaaatgtcccagggggttcgtgtgttcggatggagagggtgtgaacccttccatgtatgggtgagcctcatgctgcatcttgctcgctcccatgctattgacgtgacttgcttgggtacttgttggatacctagccacaaggagagggacagataagaccagcgaccgacgacagaaatggctgcagatgggagctcgagactggtgggtggatgtccgttgcttcgaaattcaacaagttcgaaattcaggttgagaaagtgagattgagaaagtgagagcgaagagtgccttggatatgtgcgaggaacaaccatttaaaccttccttcctgaaaaactttaaaaacagttgaaggtcatgttcgaaactcttttcagagcctaaatacgagacgccacgttgaaacacactaagggagaccatggcgtaaccacacaacacccctccggactgtagcttatgctaaatgtgcctacttactatcttgaaaagtcgttcaactgcactgaaacacctctcgaccgttctagaaggcgtattgacatactttcacgacgtcgtcactctcatcacaggcctctcaaatcttttgaaaggcctatagactaggtacctactatccttcatgacctataaattatctgttaaggttttgaaagataattactacgcctctcgactttctttcaatacctttcgactatcttttcaacacatagtatatatttcaaggtcttcatataccattcggaggcatattcactaacgtactttataagcgagtcggtcatataagtgggccagtcacttttcgaccgcgacgcgtcctcctacactcaacatcaactttctctacaacccaacatgtctcctaccttaaatgaagccaggataatcttagctcttgaagctattcaaaagactccgaaattaagcctccgggccgcagcaaagctatataacataccattctcaaccctccgtgaccgacgcgccggccggcctgcacgacgcgataccacgcccaaatcgaagaagctcactcaatccgaagaggatgctattgtccaatacattattgagctatgtacgcgagcttttccaccaagattgcgtggtgtggaagatatggccaaccaactgctacgtgtacgcgacgcgtcccctgttggcaagctctgggcacacaacttcgttaaacgccagccatagctccgtacgcgttttacgcgtagatacgattactagagggccaagtgcgaggatccaaaggttattgccgagtggtttgcgctcgtacggaacactaaggccaagtacggtattgtagataacaatatctataacttcgacgagactgggtttatgatgggcattattttcacgggcatggtggttacgacctcggacggccttagcaaggcaaaactagcccagcctagtaaccgcgaatgggcaacggtaatccagggaattaatgccttcggctgggccatccctccttttattatcttagccgcgtagtaccaccttgccaactagtataccgagtacaacctaccgtctacctggcgtattgcaactaccgataatggctggactactaatctagtaggcttagattagattaagtacttcgattattatatagcgtcccgtagaaaaggtaaataccggttgttgatcctcgacggccacgaaagtcactactcgaccgaattcgagcgccactgccagcagaataacattatcacgctctacatgcctccacactcctcccacctcctccagccactcgatgttagctgctttgggccgttaaaacaggcgtacggtcgccagatcgaagacttaatgcgcatgtatattaaccatataagcaagctcgagttcctctgtgccttccgcgaggccttcttcgcctctataacagagaagaatatacagggtagctttgcgggtactggctttataccgtacgatctagagagggtgctttctaagctggatataaagcttcgtacgctaatacctctaaacttacggcccggcactgcataactttgggtctcccagataccacataaccttcgagaagccaacttacagtcaacgctcattaagactcgcattaccaaccatcaaaatagctccccgacttcaatgctggctgcggtagaccagcttactaagggtataacggctataatgcaccaggtggctctccttcgtgcagaggtttcttcgctccgtaaggccaatgaggcactaagtaagcgccggagagccaaaaaaacacgtgtgaggcttggagggtcacttactgtacaagaggcacaggatctactggatcagaaggccgtggataaggagggagtgcaagaaacgcagccggatagtagtaatgcaaggggggctcgtacgaaggttcagtgctgtggtgtatgcggtaagcctggccataatgcgcgcacttgccaggaggctgcagatgcctcagactcagctgtttctgatgttattatagttggttgatagtttcgttgtatcataatggaggatgggtattcgaagggtggtcaaaagtgaccgacccacttatatgaccgactcgcttataaagtacgttatcttttaaggcatattaattctgttttgaagccgtgattccaatttgtaatttctattattctgtccacgacgtatctattgccagccgtcacggtgggttctttccacattgttgtgttcaaaatagggtcacaaactgaggaggaaaagattgtggtgtttctcaggctatgtatgctgccaaaaatcccccccaatttatccccactacccatggctccatcctacctgccgtcacgatctaagcatgattcaccctcctcatcagagctccctacgtcattcagctcaagcaactgaccggcctcctgctcagccacagactttcgacctagcttttcaagaagtcacaaaatttcgtcgcttctgttcgtgtgatcctcgaggtcaacaaaatgccccgaaagaggacggcaccggtagtcgttgtaatagttctcaagcaaccacaatcccgctccctccggattctccagccatgaccgcggcaccatcggtcatacgttcgaaatatggcttcctgaaaattgattacaacggcagtaccgtcttttttgatgggaacgccgtggggctgaagttcacgatggtcgatttgacaccaccaccagagctcgttgtatgcgtctatcacgcagtccggttctataccatcatccgcttttcggcactccatatcccaactgactggatagtacgcgctgtcatagatcttggcgatatattcttggggcgtttcctcgcccggaagctggacgctgccggcaactacgatgggcccattgtactcatcatcgtcgaggggaagatggggatttcggcgttgaagactgggaaggtctgcataagagtagtcctcttcgtagtcctcttcgtaaggccagtccttgggacccaggatcgtcttggtaatcgtgaacaccaactcctcgctaccaggaggacacgtctcgagtgggtgattttccgcagcaaattgtagttgagcccctctcgtgtgaggaaagttgcgaccgtagttgttcacctccctggcccattttccacagtaggcatacccatacgcctctccaaacggacttggaagtacatgtgaattgatgcgaagagtcgtgccgtttggtgtaagggtgttcttctggatcctgcttttgctccatgttgaatttcttgttaaggctcagatggtgatagattaaggggaataaagctggggtgtacgcagcagggagcaaaggaaaaaacacagctgcaggtacctggctgaagccacgaacacctcaaaactctaaacctccattcaaatcccctctggaatctttgatggcgtatggctgcagagtggcttcgactggactccgcagttttacttacccatcacacagcgtaatcgagggcaaatgcattcgtggtagtcgcgcgagcagccggagcttaaaatgagtcaagaccgtgacgacatgcttcgataaccaggctgccgagtagccttgtgaaggtcactggttcgaggggcccatgagtgcgaggtgtggcatcgacacatggaactgatcttcttcgtgagcaagcgaggcagcagcgcaagcaaaccaaagtgtctggtgaaaatttaaaatcggggtttgaaagttaattcaaaaggaggcttccctagaatcaaagtttcggttaagtaaaatggcaacgcctcccgctccttgagagcggcatcctgactcggccttttttcaacgcctttcagatgcggcgtcctgagatgatagcttgacggtcggaaagaaagccggaaggaaacaaagttctattgggtcttgccgggaagtctcgggtatacatgagtctctcagtcaccaaaattctcttcatcatttttctctctttgttcaagctaacacacttgctatctaattccccagcgagtcgaagagcctcatgctccacctctgacttacggcctaactgctcaagcagttgcagtagttgtaaagccagttccttaaagtattcatcatcaaggaatgattcgtccaaagggctgaaccgggagtgattctggtaggttcccaacaaccagatccctgtctcctctggatttttcaaccaggactccggatcccactcctcccatggacctctttccgtatcctcgggatgttctgcctccacaagcttccacgatggtacgccgtaggaatcagcttcaaagggccaatgccgccacgcaggcgaaatgtgctcgcccatggctttgagctcgtcttctgaaaggtcggggtgcaccgtacgaggatgccgaagtaatttcatatctccaatgaacgaatggagaattgttcggttgagcttaatgattttagcagtgccgtccttgcataccaacacatcgtatgggcgcaactaatagcaattgatctcacaccaccaccaaagttcctcatttgcgtcggtcacactcttgagggtgttgagcctgtcgaattcgggaagtagaggaaggcctgccttgtgctgtttcgcctcccggagaagctttgacatgggtttggcgtcggctttctccaacaggaccattcggacccatcgatgccccgctggtccaggtagagcaaaggtccatgagccatggaacccgagcgtagctcggccgggtcctagctgtggcgacttccgaaccagttggtatgccgcggcctcagcggcatagtcgaaatcggcccgagttgcgcagtctggagcgactccatcatctgggtatcttaccgctctccaaacttcagcctcaaggctaaccgggtagtaagccccatcataaatcctggcagcatactttcgtagtgcttgatcaccacgaagttgaacctttccgacaaccacaaccgcaccgttgtacggctcgtcacccagtggcagatgtcgatcctttctcctaagctcggggagttcctcagggtagtaacggcccccggatgacgtagtctgggtcatatttgagacggccatcactttcttcgtctaaaagcgctgggcggtggtgatggcgatcgtcgaaagactgttgtttggggctagtgacagttttttgtaatcgtgaactcaaaagccccagagcctagcggaacagttgtcaagacatacgatatttgagcgtcgaggtgagaaggaaaatcagcatccccttggtagttgttccattcccggggcgattccccgtagaagaacccgtgctggaatccaaatggctgcggaggttcgtgtgttctgatagaaaggacgttgccctccctgtatgggtgcatctccattgttgtctgagattggctgaataaaacaatggggatcgagacgcctatgcgcggactgaatgttgctggacattgacttgaatttgcttggtgagccctgcgagaatcgagtaataacccgagtctgagccagcaagaagagggaccagaggatagcagttcctgttggagtggacaattaaataaggttgattgattttgaagtagctttcggtaggagctaagattttaagctttaaacacccttcagccaaccaagcacatcagagaaaaaagaaatggaggctgctcttttggttaagggctttgaactaagatgttcctattatcttttgggcccttgcttcaagttacagtctattattttgtccatgaccacatgccaaggacctgagaaactgcttgaccatcgagtgtgaatctttttttcaactgaacatcagagggaactcccacaataacatttgtttcaagacagctgattttgagctcaaaacggccgacagaaacggtgcagcacaccgaccgttatctcaagtaactcttacacaacatccgactgcggtgaaggtactagaagacacaaatcctgcctctcccacatgggagccacctctggctgcatgtacacgctgtcctgcatataggattggtccatcttgcaccatccatcagcacacaaacgttgccgtgtcacctgccctttgagcttgccgaacccatatccgcttcgtatttacaggctacccaaacatccagacgttaatgtacactatcacaccctcatcggaaatcgtcacccattcgtaacctgtttctggagaacaatcccgagcgcctgagccccagaccattccacgctatcaaacatctaacaaattgacttcctgggtaataacctcctgatgcaatacgcccccccgcccacttttaggaagcctccctttatgacatttgctttttaatacagtacacggcggcccatgatcaactcccccaggccattacaaacaacaataaatcaaaaaatgtgtatatggtatatgttccggtagtcctttcgtatcgacgacctcgctgagatcatgacatcgtggctacctaacttcattcatatgggaaaaaacagaagcacaagcgtgctatccgctatttttaacccatgatcatccccttcatgccggacagatcaccctccttggcagcgatctcgaagtacccataaatgatgctggatacacaggttagcatgatgtacaacttgaagagtgaagatgtgggtaaacttacgtaacagcaagaagagttccggtaccggagccgagcgcacccatgaggtcactggcaacagagagagcaccaatgcaggcgccaccgaaggcagcggcagtagggataatgcgcttgagctccttgtacatgctctgctcacggtggccagccataacgagaccctggtccttgagttgcttggcaacatcgcgggggctggagccagaaacctcaatccaggtcttggagaagacggcgcaggcggtgagcatgtaggcaatgtagacgaaggtgtggatggggtcaagcatggcgtccttgaagttgaggggaggagacatgtagtagacgagaccggagatggcggagagctgcgaagagccgtccttggcctcccagacaccgaaaagacggaccagaaggttctcggagaagcgagagtagagcatctggctgatcaggaagatgttggaggagagggcggactgaagcatgatgggcatgtttgaggtgtagaacaggcggatggggtacgagccacgagcaccacgctggcgggacgacttgacagggatctcgacgcggaagccctggaggtagatgacagcggcgaagacgaggagggtggcgaggaggttcatgatgttgggcaggttctgtctgtagaaagcctcctggagagctctctgcttgttgggccaggtcatgaggaggtggaagagagcgataacggcaccctcgtactcggggccacggccggtgttgatcgaggtgggggagaaagccttccacatgatggactcgcagatgttggtggcaatgaagagcgagataccgctgccaagaccatagcccttctggaggagctcatcgaggagaatgacgatcataccagcaagaaccagctgaaggatcaggaggaagacaataccggcaccgagatcgctgggagggccgtagagaccggtgaagacgtagacagtggcggtaccaacggagagaatgagggcgaagagcttctgggcggtctggtagagctcacggtcggacttgaggtcgaggttgacatcgatcatgtgggtgccggcaagaagctggaagaccatgccagacgagataatgggagtgatacccaattccatcagtgtaccacggttactcgccatcatcatgcgcagccagtatagaggatcggatgtgtctgacgagacaatgccgtagaggggcatctggctcatcaccaagaagatgagcagtgtcaagccggtccacatcaacttttggttgaagggaatcttggtctctggctgctgaacctcggggaggaacggcacaaagggcttgaccaggtcgagaaatcgtactgcatggcgaagactggtcagcgcaactgtcacaaacgggagcttctcaggtgggagctggcgatgctagagggcggaatcggcaaaaggagatgccaattgcaaaggcgcaaagctccaaagaggcgggagagctgttgttgggcgaggttgatggccagcgcgaagctgtcgtcatgacgcgccagggaagtgggcagacaggtcaggccaggtcaggtactcacaagaactcatggtgggcagtgggatgtggaaatagaaaaaaattaattagtaaaccatccagaagaaaaggaagggcgtcagtgagcgacaacgactctgggggatggcgagtgtcgtcggcgcaattgggggaagaaaaaaaggaagaaggtgatgctcagctctggatatggagcagaggcggctgcgtagagatctggcttcaaaagttattctgtgatgtgtccaatttcgaatggatccacacgtgacccctgaccacccaaaacgctgcgcacgtccccctttccctgtgcagcgaccagcctgcggccagctccgaccagaccaagctttttgccaacgccaagggtccccttatccaattgaccgttggagagacatggggagcctcacattcacttcaaagtgaacttggagctggaaaaagagaatctcatcaaaattatgagctggcttacctatccatagttggctggccgcacacaacaacatcccgtcctacctcccacatgaagttctttctgcaaactctgcgactcttctccacagcatcccgcgtgcagataccagtatcaaaagcaccacaaatccccattatcaagagaatgaagcctctcattatcatctatgggtcaaccggcaccggcaagtcagatgtaagtgcatctcatctagccttggcgttcgttgttgaccactgtcccataatagctcgccgttgagctggccacccgcttcaacggcgaggtcatcaacgccgatgccatgcaaatgtacaaaggcctgcccatcatcaccaacaagatcacactcaaagagcagaaggggattcctcatcacttacttggtaacatcgaactgggcgaagatccctggttcgtgacccgcttcaagcaggaagccactcgtatgatctctgagatccgttcccgagacaaacttcccatcctagttggtggcagctcctactacatcgatggcctcctatttgaccagagacttgtggagaaccaaaagacctccgaagagggctggatctcaaaccgcgaaaaactggcagcgcagcatcccatcctcaacagctcaggcgaagctatgtgggccaaacttcgcgaagtagatcctgccatggccgacaaatggcacccgaatgacgtccgcaagattcgaacctcgcttgaaatctactttgctacgggccgcacagcatcagaaatctatgcagaacagaaaaccaagaaacgagccagatcgccatatcaggacccaagtcttggtgatgttctcatcttttggctctatgcccatcgcgaccccctcaacactcgtctcgacaaacgagtggacaaaatggtcaagaacggtctggtagacgaaacttctgaagtctacgagtacctccaatctcgtctagccaccggggaaacagtcgatcgttccaagggaatctggcagtctatcggatttcgccagttcgagccttatctccaagcccggaaggaaaacccggatgatgaggccaatctagcaaagttgatggctgccgggatagaggataccaagacagcgacccgccagtatgctaagtaccagctaaggtggatgtctaccaagaccctcacttctctccaggaagagaacctgatggacaagctctatctccttgatagctccaatctcgacacctggcaccaagaagtcttggaaaagggcgtttacatcgccgagaagtttcttaccagcaaggagtcgctccctgctcctatctcaatctcagaggccgctcgtgaggtgctggccgaggcgcttgagaggagtaaccgaaaggatacaccatgtcgaaaatactgtgaggtgtgcgaaaagactttgctgaccgaggaactatggcaacagcacatcaagagcacgaaacacagcaaggtggtaagagcaaagaggaagagggcgttgatacccgccgaccgcgttccatcaagggcgcttacgaaggttgatgatgatgatagcaatttggagccagagacaaaaacacagaagatcgaggacgaaaatctacaagaacaaaatttggaaggcaaataaaaatgaactatctaccacacatctttcgggcctcgaacccatgccgcagacttagatgcgggccacacaaccaaacttaatttcaggcttttgcaaccaattcacctttgacttctcgacttctttcctctctcctcaatccaaataggtaaactcagcaaccatgaccacctccaacccacaacctcacccttacaaccccggcaccaccctccacctccacactcatgtcctaccccgccctttcggcaccatacacgcctgcttctacggtgagcccaaaaaggtctacaacaaatacaacggcttcaacaactttcccggctgccgggatcagatattggatttcgtactggataaccgccccgtcaaaaccacccccatacccctcgacaccatcccattcaccatcaccaaaaccgtcatcggccccaagccattcgaccttgacaactaccgccaggaagaagaggaagaaaaaagagagggaagttcttcaaaacagtattagtgacagtataaagagagtcaaaaaaaaaaaagacaaaacacagagggccacggccctgcttacaaaaaaaaactcaaacatattgttcatcaaaaatctcagttttccattccatcgtctgtctgctcatgaacccccaatttttgtataccataaattttgtgtaaccaagcaaaagaaaaatcctccaaaagcccacccaccaacgcagaaacaatggtatcacctgcaaagaagagggccatacatgcatgctatatacaaccaaaagccaaacccagtcttctttacaagaccaggtatctcaagcctcaatctggctcttaacccacttctccaaccctcccctcgcaatgatctcctgcacatttggtgggagctcacccaccttctggctccactgctggccaccctcaccctcggtgacagtgaccttgctcctcctcacatcccacaccaacttccagcccgtcctccgggtaagcaccttgttaccctcaccatcagccttgaaagtctccctcaacctctgcaccagcctcggtacctcaacgcccatcagcgcattgttgatgctgttcctgctaaaaatgttaccaaagctgcctgagaccacaagcggaatcttcttggccaggatagcagtagcagcctgctcacgcgagctaccacaaccaaagttgaaaccagaaacaaggatatcaccctccttggccacctggccaaactccttgtcgtagttctccatgcagacctcggccatcttttcggtggtgacgttgtcttgataggtgtacttgccggggtagataccatcagtgttgatgttgtcggcgtcgcaaaagacaatctcgccctcgatcttctcagggaagccagggaggatctcggtgagggtctcggcctcggcagcggactcagcagcagcagcctcgtcaccagagaactccttctcagcactggcaatcatgctgtcggcctgagcgatcagcttgtcgagagcctcctcaatgctcatggccttgtcctgcaccacatctccgttaccctcgccaatgatgaccttctcgacaccctctggcttctgataccagcctggaccagcaatcttgcccttgagggcgctggcagcaacgacttcggggctggcaagataggccttggcatcggtagaacccattctgcccttgaagttgcggttgctggcgctgataccgacctcaccgggctcgagcagaccagttccgagaccaatgcaagggccacagccagaggggaggggctcggcaccagcggcaaggagcacctgccagtcacccgcctcctcagcagccgcttgctccagcgtagaagcagcagcaatgtagaacttgacaccctcagcaaccttgggaataacgccgtccttggcgacttccctgaagacattagcggcggcggcgatatcagaggcacgggagttggtgcaagaaacgaggtaggccttgttcagcttgatatcctgggcctcgaggtccttaagtggggtagcaaccttgacggagttggggccagcaacaaatggcgagagagtagacaggttgagatagagtgacttggcataggtggcaccagggtcggctctgagctggttgttgatcaaatcgtcaatcttctcgtgtgtgaacttgcccttggcggcctcggggttgaacatggccgccgtcgtcgccttggctctgagccattgctgcaagacagagtcgatagggaacagtccactgagagcaccccactcggtggtcatgttggcgatagccagacggtcatcgatggaaaggctacgcatggtctcctcagagccggtaaactcgatggcgtggttgagaacgtcgtcattgttgaacagaccgcaaagagcgacgatcacatctttgccagttactccaggtgggagaatgccagtgagggtaaccttggcaattgggggaatctgccaccaggttcgccctgtagcccagatgctggcagcatcggtgcgcaccatgggtgtacccaggcagcccacaccaccatacatgttgctgtgggagtccgaggcaacagtgacggttcctggccacgcatagccctcctccaccatgatctggtgaccaataccccgaccagcaggataaaagtcaacgccgtgcttgccagcaaactcctcgatctgacgatactttttcaagttggcctcgctcttgttctggacgtcgtgatccagcgtcataacgacctgcctgttgtcatgaatcttggaggcgccgatggacatgaacttcatggcgactggccatgagttatcgtgcgtcatgcagtggtgtggtgcgagggtcacatagtcgccagacttgaccgtcttgcctggcgcaaggcccaccgagtatctctggacgatcttttcggtcaatgtttgtggtgtttgggtggcagacttggcggagggaagaggggcagcgttctcgagctgggagtggaaggcttcttgacgaaggcgtggtgttgtggaataggcggcggtgcgcactcgaggaatcgacaatggtcgctgactcctcgctgacaggaggacctggcggccaccccggcttgcggccagagctagacttcttctctggtggatggttagccaatgagtcccaaacgagcttgttgttcattgcgacataccacaggcgcaaacatgattgtcttgagagagcaacaatctcgccaattccaaaaaacacacagcgatatcaagacgaatggagagtggattgcgggatcggaggggacgattgcaaatgtctccaattcgagtgggcgggcgacatgaaattttagtggggagtggccaccggccggcaaaagacccctgtcgtttggaccccagattgccgttcgccctcaccgttcaccgcactgctcacgtgcccaccggcagagggctcaccgtggcccttggcatctttacggagtaccgcggtgccatgataccgaacccacctcgtctatgacctcagcaccatctaaaacaccgaggaatttgggcgtcgatacccctggtgagccattttgatgtacatggtttcattatgagccacaattcgcacaataaatcagcccgcagccgggacctttcataacttcaaaagcatgtgatcccgggatactgtgccgtgctccgtacttcttattcgcaggacggggagcgcaggctccggacagtttgtatgtcggagcaaatcctgcccggacatgtgacgggaccataccggcaacatcgcacaccttccgcagacctgtgtatcgccagaggcctccagaaatgagctgtgaggcggtgactatggtatacgtatgcggtatgtgtagataatttccgagttttccgtcgtcgtcgaatgattgtttcgagttacggcaagaggcgctggtaaggtaagggctggaaaaggggccaacttgacagttccatatccaacactgtgggtgacctgggatctccatgtgtgcagacttgttgagcctcacgaagttgaggttaaagtaaacaaacttgcggttacagccgaaggaaacccagagctttgggaagatgcagatgcttggtagatactgttatgggagcttatttaggccaccccgggcgtgctcgtgttcgcattcctcgcatcttgagctcccgtcccaagatccgcgtattcagaatcttatcgatcaaggggacaaggttagcagcgctccaatcagcccaatcggggaattcgtggcccaatcacagcggctatgcgccaataagaggctgacaaagccgtcctatttcctatcggggacacaccaacaccgatgtccgacaaacaaagagatgcacagaagccgcccagactccaccagttgcattacgtagccggcacgcacacttcccggccacatttcgcagtctttgcgaggtgccagtggaccagagaagaccaaatcgacacagtcctgaaaaatccaattgaagatatctccacttggagtgctggctgtccccctggcccctgtcgaccaaagcgagggcgggaagattccggcggtacacaaggagctctttgggcatcctctttgaaggaactttggatgactctgccagattcaactcacctcactcgatacttacgagcatctcccaataagcatcagatatccccgctcctgcagcgtcacttcaaactttaaccgtgggtacttatacgccgaggtgggtggcacaggtcacacacagtgtcgctgactgagcttaggcatccagggtgttattattcagggagagcttctttcgaaaacgaaaacggtctgggagtggagttgaagatctctcccgccatctacacaccgcgcccacggtacggcacctactaaacccccaccatacccatacctcttttgcccctccattcttaacgcccgccacacgccctcgccctcgaccttgttcttgaggttccgacgaggttccaagttactcactccttgcggtagctgctaggttcgaaagaatacggattcgagaaaatagactcggcgtagcatcatgctagctgattagtcccaattcgcctcttctgactctttcgttgttggtcttgtttctcctgctctctccgacgcgcgcaaaggcaaaggttgtgccacggcttgttttcttccgtcgccatggcatcctcatccaccccaagctcaaccacttcggcccccgtatcgaacccctccgtcgcgccgccaccctcgaacaagcccacgcgcattcttgcctgcgttctatgccaacaccgaaagatcaaatgcgatagaaattttccatgctccaactgcaccaaggccaatgtcaagtgtacaccatccactcccgcccctgcgcgcaagcgaagacgaccaaaccaggacctccaggagaggctggctcgctgtgaagagttgctcaaagagtatgcgaccgagaagcccgagggcagtgtgacgacgccaagagcatcgcaacagcccgccttcgatgagagctatctcaaatggcagccagccggccagctggttagggatgaagggagcatgcggttcatagacaacccgatgctgagctctgtttatgatgaggtgggttgttcttgtcgcctgtgtatcgcagtggaagaaacatgcactcacataggatgcgtcccatacagcttcgagcaatgaggcaaatagtcgactcggatgaccacgatgatagcacgtctgatactgcgcctgatgagaactcagatctcctccttggcgatggctcccccaacatcaaaatcgagacactctggccagatgccgcccatgtgatacgtctgtggcagatatatctggacagggtcaacccactgacaaagattatacacgtcccgactttgcaaccgtacttggccgaggcggtcggcgggtcgcagtcattgccgaagaatgtcgaagcgctcctcttctctatttttctcatggctgttgtcgcgctagacgcagatgaatgtcagaatctgctgggttactcgagagaggaagcgcttcaaaggttctcgtcgggtgtgcggttggccttgctcaggctgggcttccttaagacccacgatttgaccattttgcaggcccttgtgatctacttggtatgtccatcagcatcgtcttgaaggcgctccggctgctaacacggcgcacagatctctctacaaggtcgatacaatcgccatgccgcgtggattctcaacggcgtagttattcgtatcgcccaaaaaatgggaatgcatcgtgatggcgaaactcttggtctccccccattcgagtctgaaatgcgccgtcggttatggtggcagatcatcatggtcgattccaaatatgccatcttctccggcctcagccattcgctccttccacgaaactgggacacaaaaccgcccaagaacctcaacgacgccgacatcttcccatcagcgacagagccattccaggaccgcgaagggccaacagagatgattttctgcttacttatatacgcctttgctaaattcctggtggaaactccgggcttcgataccatgttcttgctaacctcacaaagcgactttgtatccgaacgtgatggaggaggccctcctgaacaagaaatgatcgagtaccggcggacggtagaaaccttgggcaacaacctcctcagcattctcgacaagtattgcgatcctctcgccggcccagttcaccaaatggccgtcaacatgcggacgcacatcatcgataagatcatggaactcattaccccagccaaacaccagccagaatggggcggagaggtccgcacactcaaagacaacaccttcaaaatcgccatcggcacattagagcacaacgaagcaaactacatctccaccaaggacaaaggctttatgtggttttccctcgcacacttccagatcgatatcttcatgtacatggccggccaactctgccaccgcacagaaggtgtactagtcgaacgggcttggagacaggttgaggtggtttacacgtttcaccccgagctattcgacaccaacaacaaactccatgccgcgcttgcagtgtttatcttgaaggcgtggaggaagagagaagaaacactcacgcaaaggacaggccacagaccagagacaccgttctacgtggacaggctaaggacatcgatgccaaacgatgactacaaatcggagcctacaccaccagatccttacacaccggcggctttggcagtgggggcacacacaggcatcccggacaacaatctggactcattcctggggtacctggatgctagcgcattggactgggatatgtttgggaaccaggtaaatggcggggcaggaggctcatcttttggcgcttttgggatgggcccccaggtagaatggtgatcttttttcttgggatacaaggatggagctcgcggggaatatttttggtggataagacaaaagaatctttttggttttgctgtctttttaccttggatatatggcggaattttacatgtacatggcttattatctccaagaccgggggaagcataggggaaagttgggaggtggtctagatacctttttatttgtttgtttgttgatcatgctggcaatgttgatacctttgttggtatcattgggcttttgtttccataccggtccatgatttgtgtgtaaaaactctactcttacgactttgacgatatttaatttttttttgtttttttttgtgttggacatgggatgggcagcatggtgggttggtgtgaagttagcgggagggctgaatcacattttgaagtatttttcagtgatcctgtcgtttgcttttgtgtacacatgagatgttgggtcactgtataggatcacccagatgcaacactattcttacaaccccccccccccccaacaacaacaacgaaaagggaactcagctgccagtctggatcaccatctgctgcaggcgctgtattctttgggaagtctgccttattttgacatgtcaccagaagcggaagtaactccgattactcccgggtcgggcttcggatatgctggtcagaagatggagggctttgctgaccgcatgcctacctctcccaccagccaacctgtaagaaggggtcctgctggatgtgggtcaaccaagttggctgcccaaccgagaattctcgatgattttatctgaccagtcactggctgacacaacgaagctcaacaatgcaactttaccggacccttaacggggtggagggtattttaacgctgggatggatggggcgaagctacctatcaagttcaccttatagatgacaggtaactgcatcatgccaggatcttctccccccacccgcacatgttgttcagtcacgggggtcggtcgatatcggcttgaccggggcctattaacgaacaaggaaacaagaccttccacttggaatgatgagggccctgaagaaaagattggtagtcctgacaagagaacccatagaccactgagtatagtaggacggctttggatatatattacgggatcgtcgagaagcatcaagcgatcagcagaggggtctgttgaccatcttttgggcctctggatgctttcatcactttctctgcttttctgtgcacggccggacggtgtaaagcagcgaaattgagcttcgcagggacgatggttgacttgtgttaccttccccgatagacgacctgcatgttggggatgttggtaggtacccagggaggcgggggactcagccctattgatgttatcatctatcttgatgggcggaagggaaggagatcttcctgtaccgctagtataccttttcactagaacgggattcgggcagatcttgggtcattgttcgggtattttgttctcgtgaagatagattcgtacacctcctcacctgcagggtgtcgctgtagtcattcagagtccacaaagtacctggcatgcctgtctcatctttacctatctaacaaccctcgtctctccaggactttggatgactaaggggaaaaaagcatatacttccgccgccgaaggagaatttaaaacttttaacaatagcagcagtgtacaattcacaaatcacaaccaccaatccctttgtaagtaggtttataaacacatttccattctttcccggaataaggtagagccaaaactcaaaaacaaaaagtatatacaactgaatcctcctcaaatcccatcccatccaaactgatgctgatgatttatcctcccccccctccccccaaaacgcaatgctatgctatgccatgcaaaaaaaaagaaaaaaacccttcttttcctcccaaatttttcttacatctccccccttccaagaattctcaaagagagaaacttagatgcactggctgtagtaagggttgagaacagtgcaagtagagccggaagcgcaaacggtagggccagtccagccgttgccaccgcactgtccccacttgggagcaacaccagcaccgccggtaggagcgggagcggcagaggtggcaggggcggaggtgacagtgacgagggtagtggtggggggctggacgacaggggcggaggaggtggtgacgacggggccggcggtgggggtgacgacgggagcgccggggagggtggcagaggcggtgcgggtggcggtggacttgctctgggggatggagctgacggcgccggcgatgagggcagggccggggacggggtagttggggctggcgacgtaggggttgaagaggatgccggcgtcgttggcgcggtagagggaggtgccggcgacaccggcgggggagttgttgccgttgccgacgatgcggaggttcaggcactggggataggcctgggcgccgttgggggaagagccgccgtggagggcgatgatctcgtggcggaggacgtagttgccggccttgaggtcggcggggatctggacgagccagctgttgccgttggcacggaggtcgtcggcggcccacgtgcgggtgttggggttgtagccggcaccgccgatcttgaaccagcggagggaggtcttgtcgacggtctcgcaggggccgttgcagttggcgaggtagtcgatgacggggccgatgtgggactcgggccactcgggggtccagacgatggagatcttgtcaccggcgttgacagtggcagagccgccgccaggagcagcagacttgtggcagatgatgtcggtggtgccgaagttgttgggctcgacgaagccgttgtcctgctgaagagcagaccagccgatcacggtaggggggttgggctggtagaagtgggttgtcgggtcatagttctggtagtagacaccgttcacgatgatgtgggagacgtggccgtgggcggcaacgagggcagcacccgagagggcggcgagaagggtagcggccttgttagacatggtgaagagatgtgtgtgctgaatctcactctgaaatgaataggtgaggatgtttgaccgtgggctggtgatggctggagtgctgatcgacggatgaagaaccagaaccaagggtgacagcaacggcgatctttatactcgatggctttgggcatctcggtccatgttaccgcagcattcacgacatatcacgtccagtgaggtggaccaaaggcgttctgggtgttcatggaggaggtctgggcgcggtgctagcggagcatgaaggagggcatcccggggccgaatcgatcatcggcaatgatgttgaatgacaaggggcgaccaaccaagggcagtgtggggtaggcgaggccgtggtgatggaggctcaaggcaccatgcaccccaacctggggagcatgcggtcaggtagcgagcttcccaagagtctggtccaatttggggtgccctgtttgcacatgttggcgccaccaaaatgagggagacggcggcagggaggccggtgacaagacaaagctgcttggaatccgaggtcgactgaaggagatatcggactgccttcccgccttggagcccggggaagagagcctcaagagggatcaagaaacgatgtgattggcgaaggctgacaagagctcgatgctggttcccggcagacagttcaacgctctgaggcaccaaaccggattaggattacttggatcgtggagaggctcttccgtgccgtcttgggaaagacgagcgatccaggggaacgggggggtggtccccacttggtttgtggggaaaatgtaacggcgtttcaacttagcgcgccgtagggaggtggtgttggacggtcatggacggatgaattcggtgacatccgagaggtgtagagttgcagtctgaattcaggcaaaaagttggcaagtctggcagtggagcggataatccaggtcgacacaagcgacctcgccagagacaggtcggggatgccctcagcctgcgctgaacccgactccaaggttctcgcaatatcgaggtcgctttagttcgacgggctcaataccgagtcgcagcacgggaacgggagagctcgtggttgacagtttcggctaaagagtagcgctcccagcagacaacgtggtggacggcattttgcattgacggcgtggggaaggcaatgggaaaagtataagatggcctgtttccaaccaaattggaggacgaacaaggcgaaacagcttcccccaacttctgcggttcgcatggagatcgtcgccgatagtgcctgccgccactgttctcggccgcttaaacgctttagccaagacttcgtctgaaaaagggggcaagaaggcttcactctggtagtgcataacgtcatcatctgttccagcttaacttgcacttggcttgcaaaggctcaagcttcacatctcgcgagaggctcggcagcaggaatttcagatcagatggccaagttcacgcgcggcttcccggcgcgggctcctccacgaccgccaccgtcccgtcactccgatgctactatccaccacagaggcccacatcgactacaacgattctcctctattgtctcgaatcttctagtttttgatttttcttgtcctgctgacagtctctttcttttcaagattttcattcatgtcgatgttgttgttgactatggcgatgatgttgatatgatgtccctcactgtgggcgacttgagaagttggaagggccggccctgaggttcatgtgtgactctgagttttgaaagagttcccattgtgagagctgtggaatcgcgccatgtttgcccgagcagcacaccctctcggacgcaggtctacccaccactgccccgttttcggcttcgttgtccaaaacaagactgaccatcatctctagcttgcaagtaaaacatccgacagcgcttcatggagcgttggatatgtgcgcgttcaagtggagagacataattatcattggtggaatgcgtgcccggtgtaaaatgcatgctggtggtgatgatgctcctcctatcgcgagagagaaactgagctgcaatgagaaaccaacatcaccctatcttgaagctaattcagctagcacccgactaactcgaaaaactgcggtgtcatctcttcctaggctggttttcttgttggggatttcaagaatagaatatcaagcattatgaggttgaggtcctcagttttcgaattcaaacacctcgctgcctccctgtctttctcgtgacaccagccacatcatcaaaaccaacatcgtaggtcaggcgccggcatcggtcaaacacatcaccatgacaatgtccaagatctcattgatatcgaatgcaaggaaccgcccagcaagacctgttcacgtatctttgctggaaagcagtcctaaaacgcaaaatgggccataatcgaccaagagactcgtcccaacattgtatttcgtctgggagcaagcgaccgtagttggggtcgagagccgctgctttagcttaataggggtcttttcaaaggtgggtgagcaagcgacgggagcagagaaacaagttgcgagaagagaatcttcaaggacactttccacaattgtttgtgggggcgtttggcagcgtgccattatcaccggggtctgatggccagaattggaagaatgtcaccagacctatcgaagacggtgagagaggggacgtcttggacacagggatgggcggccgccgttctcacagcaagtaaccatgtatgtctgcaagaatgattaacaggcattaaaattaccaacaggccttccaaatagccagtatatcttcttacaaatgaatcaccgggtctctaaacgtagttgtggagcagcaatacctcaaacctccgactgtttctcccctgtcggttgacagagcatgcagcctttccaaggaatattggcgccggagggtcggcttctggagcaacataagcaacctcgaagctacgccatcatacgtgtcacgctcaggagtctggctgcaggctaggacagtaccctgacagaagtataatggtgacgacagaatgcatttggtagaatcaatactaatctcatcaacataccgacccagaagccccagtcccagcaaaaacaccatcccaactccaaacgccctaccaaagtgtgtacaatatgttccctcaaatcgcatcatggcctccaactggtccaaggtcttggcacagatccgtgccgcatccccagactcgggcctcgaatcagaaccggttgcttcatccgcacccttgctgccaacggtcgatcccgcccccaccatgccggcaatctcgactccacaactcaaacagagctcccgacgacattcctgttcttcagtctcgtatatccagctctgttgtatctcctcaaacatctcgagcctccccaaaacaccaccgctgctaaccccacgagggacgcaaacagcaagaacagatgctcaccaatagccaagaacatcttgttatcccagttcacccaagtcccacctctttcctgggtaaaaaagatccactcgtccgcctccggcctgtcgtccatgatcaaccggtaacctctgtgttccatctcgggatctgccccaggcttcggcagcaacgagtggtacttctcccacacagccgtttcgaaccactgcccactcgcaaaactgatggtgatgtaaggaaagaaataattccagtcgtactccatcagtgacattgtaacgaggttccagaacgggtggcgaggcttcgacgcaaggatgttgttcgagagagctccgcggccgccgtcggtgatccaaaacggatagtatagtagaggtgtcaagtccgttttgcagccctgttgcagagtattataagtatcttgtccagttgaaggatggggaaaatgactgacattgtccagatccatgtatattcccccatgatgatacagcaaaaagtacctcacggcatccaccctctgcaccttgtaccgatacccatcatacgtcctcaaaaaccaagggtattccctttcgataaattctctcgaggttcgttcggtccacaactatcatcaccacccaaagtcagcattcccatccccgtcatttacacaacccccacctgtaccaccacacaaacctaccttaaactcccaccccggattcctctccacacagcctcccctaaccccctcccaatcccccggcaaactatcattccccggttccttccaattgtgaaaaacctgatgcacaatctttggaatatgctgaaccctcttccctcccccccccaacaacccatgtccatcctggttatacgcctcaagcgcatccgcctgccgtagctgaatcccggcatgctggaaaaagaggcccacaaacgccaccaaccgcgcgagaatgtaccccgttccagccaacaacaccaccgcccaaaggatgacggatatcttgatcgagatccgcatcttttgtctttccccgtccactgtactcggtcggtcggctggctcgtcgccggggggcaaaaaagtaatatatgtaaggatagcaagcagcaaacaacaaaagcagatacccacacgaaatcaatacgtcacatccaaaatggctctctctgcatcaacaacaaaaaacaatgttgccaaaaggagaaaaaggcagagaaacaaaaagtgatgtcagtcccaaaaacttcccaggcaaccccccgccctaaatttcccgcccaaagtccgacgtcaaagtaaaaagggagagacagaacccccgagcccaggccaagtttaaagttcagcctctctcccttcccgagttcctaccgctcccgagacatgcacctcccttattacctacaagggagggctggaaagcacccgggattcccgaacccgaacttccaacactttcaaggcaggcacccagatccacgaaaaaaagcaagaccgtttgcgtggcttgcggctgtgtattgctcgcaccgcatgtacctcctccccttccacacacatgggggacaccgttcgtgcaacctgcaccacgcgcgcttgcgcactgtacgagcagcacagcagcacccttcggctggcgctgaatcacgatcggccctgagaatgacaaatgacagacatgtgcccgggcttgtcttggcattagcccggacaaagaattgacaggttgccggtgactgctattacaattattagctctatggtcatgctctaatgatgtttgtctatccgaaaagttccccaaatccctccggtggtataagcctcactgagcatccttcccgtgtcgctgtctcagtgtctaatttgaccatgtataatcgctggctgtgatgccaccagcccccgtcgctgtacaccagtcagcatcatccaactaacagcggccaatgagtccaatctcaccttatcaatacagcctcaactcaatatcgctatgcctagcacttgagctcaactccaactccaaatccactctatgctttcgtaatctcttcgtttggtgatcaatccctcctactttcatacccatcaaacgtaggacactccctttccagcttcctcacccttctaatattaaaccccgacaccttatcttgctccttcacttcttcccccactatcatccacggactgacatgacacctccccgtggatgactcccacgtccaagcgatacacgtcttgaaagccttttccgtgcacttctccatgcaatcctgcgccgacgcaacattctcatgcgtgtaaacagcctcatccaccggcccaacataatcccagtccaaagtccaagcatccacctctgaatcaaacggcggcgcagaccggaaaataacacacacatccggctctggcttcccccaagcccaaccggtcccgatactagcgcgaaaccgccggttgtactccgccaagcactcccattcactcttgacatcccgcagcacaatcctcgacatctcctccctctgcttcggatccttgatcgtcttcttcgtcatttcaggatcccacctccaaggagcaggcaccccataaatcttccacaaatccaaccaaaacaccggctccgtcacattcctaaaatgctccccaacgtccctcatcatctccggctgaggcaacgtgtgaaagctcaagataggagaacacatcctgtcccctctgattttactcctcctcggcggctccccattgaacaaatacgcatacctctcatccagataaattcccaccctaatcagcgccttcgccaacaaccgatccccccaaacctcatccaaactctccaaataactcgtcttgagcgccttcggattctccttcaccaacgccctcatcgccgcctgcgacaagataaccgccgaccccccatgcgcaaacctcgcccgaaagtcaccaacggcattaccaagatagtgcttctcctccgggtcaaaatgtcccaaaaacctcttcacactcgtctccaccagaaaagtatcatcatccaccagcaaataccacttcttgtccggccacctctgatacgcaaactccagcccaggtataaacttcaacgcgtccaactcccacccaaactcctttgacaaaccccccgccagctcctcatccttcgccccaacagcagcagtcaacctctcatacttccccaccctcttatgccccaacaaaccccccaaaatcggattctccaaccccctctccaccatatcatacaccttgaccaccctctcccccccatcacccaaaaccatctcccccccataatcagcaatcacaaccacctccccccaccccccaacactctcaaaccaagccggaaccctcccccgagtcccataccccgtcttcaacacaacccccacatccctcccccaatcaacctcgtactctggcctctccctcaaaacccactcctcacttggccttcccccggtcaccagtctcttccagttccacctcacccccaacctcagcgtggaatcatacggcagcaccgccgccccgagcaaaaagcagacaatgacaaaaaggggaaaagacagccagtttgacttgaggaagcggatcgctctcctcaggggcctgggaaggaacctccttgttgatcgtcgacgacggggggtccacccagagccctgggcgatgttggcgtaggggttggcggtttggggatggggttgtggaggatgtgatggtgaggggattgggggttctaaagaggtgtgttagtccacaagataaaaaggggaatgggggggacataccaccgattagtccacggacaaagtcagacagtgtcatggtgaaaatctcgcctctctctgcttgcggctggttgactcggagacgaacacaaatccagttgaatgaagaagcctctcatgaaaaaagcaattaaacactgtactttcataaccccatacccatcataagaagaaacctcaaatgagggagataaaaaaaaaacccaagcaagcggaaagataacaatcaacaaaggtacgatcaatgccttgcttgccttgtctaacagagaaaaagaaattaatgttggatgatgatggtcaattctcccaaaaataaaaagtgagagctcaagttcaggcaacgcgcattgcgccttggcaccgctgagcagtcgcgacttggcttttgctgcaggggtggtggcggttggtgcagacgctcggaccatatcgccaaccccccttgaaggaaggagcccctgagacaacaatggcaagagcaaacctctcgaacttcaaattataaaaattgcatgtgaggatacagggctcatggcggctactcccagaattcaatgtatttcttctattccctacttgattttatttttgcccacaataaatcgacagacctttgatctctaaaccttataccccctccctctcatcctcaaaggaacacctcaaggttaatctccaaagtgctcaccgggtatctcagatcaaacttctccaacaccgtcgggtgcaacacacccaactcgccaatcctcttcagctcaccacccaacctcacataaatcgcagccgccctccccttgaagaaggttggctcgtcaatctcctggatgaaatacccatcggccttgcttgggttctccttgaccgcatagtcgatgctcttgccctctaggccctcctcgtgcgttacaaaggcaaccttcagcatcgtcatgacgcggtccagcaagccgtgtacgatttcgaaaccgctcgtcttgccatagtaagcagccgcccaccgcctctcgtttctcgccttgcgctcaagggactcatccttgaagacgacatccgccgactcgatgatctggagaggcagcttcatcgccttgttttcgctgagcgtcttgaggagacctgggaggagggatgtccgcgcgacttgatactcgacggttctggggttggcgagcttgacggcggttttgccatcatcgacacggttaagccactcgaagttctcctcgtgcgagcagagaatgagaggcatgacctcaacccagccggccatggcgcattcggtacggacgatatcgctgagcttgttgatcatgagaggcttgccgatggttacagacctgtttggtgatgagcgggggaggctgttgaaaccgtaggcgatggcaacatcttccatctacaccaaattgtcaatatcccataccgaaccttgagaaaacgggaacagcttaccacatcgcaagggtgcaaaacatcagcacgagttggtggcacagtaaccttgacaaacttgggatccgaagatggttcagccttgtacgccatcttgctcaacaacttgcagatagacgcgggggactcgctcaggccagtaacctggttcaggtagtcaacctcaacatccatagtgcgggcagccaagcttggcgttacccgggtggtgccgttgtgctcggaaaccaccttgacaggctcgattgtgaagggctcggcgcagtactgagagaacatggcgaccatgatgttgcagacaatatccagcttggtctgatcggttgcagtcatgtcgatgaagacattcttggtatcgagggtaatcttggagcgctcgctgttgatgatgggggggagagagcagatctctctgttcgcgtcaaggataaccgggtagacgggcttgtcgcggaggatgtggaggtaacgaccgagatgtctgtcggtctcgtagaagctcatgagctcctcaccgttgatcttcttggtctggttcagggggacaaagttgatgtccttgggtgggagggcctcgtaggtgaaggggccctggattgtgtcgagatcgtgggtaccgatgctacattccagccgtcagcattctattccttctgcgcaaagccagcctcgatgccgaagtcggagccaccacacgtacgcaaccagtgttcgttgtctcgcaaggttctggtggagcttgtcctgcaggctgatgaaggagtcgtaggagtcctgggtgaacttgatgttgcgaaggatcgcgccggcagcataggggcggacctgctctgtttccttggtgatgatgagggtctgcatcttgtcctctgggatgtcggccagcttccagtttggtgtcccgtgtttcccgcggaagatgtttaggtgcatcgcaattcctgaatagttcctctcagcatgtcttttccccttttccaaactctcctccctaaggctccaaccaaaaaggggggcgtcataccctcgaagcacaacatatcataacggttggcgggaatctcgatcgccaactcgggcttctgatccttggggcgcgaagggtcattctcggtgtccttgtcgagctcaatgccaaagtcgaaacaaagctgctggaagctctcctcggtgaacctgtttcccaagaacaacaatcggtcaacctcctcctggtcatggtgggataagcagtgcgcaatcttactgctcgccgagctcttcaaagagccggtacttgtcgacgttgatggtaggcatattgaagaaaatgccaatcaatttctttttcctttgtgtcgtcgaaccgatcaagtggagcggaattgaaaacgacgtaaaaagccttctgctccggaacggttgtctttctaaaactccaaggcggctaggttcgtgaacattcagacaacacaggcctaactcgactcatccaacgcccccagtccggcctggaggggccgcacttggctgggatgactcaaaatgcgggacgggtttactgccgggcgtcaccgcttaatttctgatggaggggttgttcccccactcaccttgctcaccttccactcgccgcgctccttctgtgccccaccgacagcgcacagacaatttgcacctgctctcaaatttgcaagcgtgcacagaccatctaccctccagtatatattgcccgctcccctcccatattttcgtttgccttttcttcctttttttcttcatacttaccttggctggcctccgggagatcaagaattcctagaggtatggcgaagagccttcattgcacatcgaggagttcttcgtcattgattgtcctacgggatcgtcatggctgtaatttttgatgttttccacaccttttttttcattgtgcgcttgattctgtcgagccatgaggaagaaaatttcattcccattcgcattgtcatcagtgtcttgatttttaatgcggaaagctgaaaatgttatgggttcgggtgttggaaggccgctcgttcaaatgtcccaatcacatcatgtcatcgtggcgttgaagtcgcgacttgcatgtcaacaaaacaagctatcgtatcgtagcacaaccacaagacacaacactcgctcctgtgtcaaagtctctcttctctatataacatctgcttcctaccgtggtatatggtcgcaaaaaaactaaaaccgcaaaaagcgaaagaacaaaaagaaaaaagtaatggtatctcttgtcgcagatttaagaaaaacaaaaatccacttagaattaagaaaacaataagaatgcagaggccatccatccccaattcttaaccaagacaaatatcccatctctataaagtccatccatccatggctttcgaaacaaaagcgaccgaccgatcgaccgaccaaaccagcccaagataatatccatcgactcgaaacagtccatcccgccggcgcacgcgctgttgagaacgcaatgatggaaaaaaaaaggctttccttttaaaacaaatgcaatagaactttcgccccagtatgcaatatgtctttctttgatatcccaaaatgaagaaggaaagaaacaaaaaaaatagctgcactgcaactgaaggggtggggaataaatatcaaaaacaaaggttataagaagaacaacatccatcacccaagaggagaaacaattcactccacacaccattctctccaaaaaaaaagactcagcccatcaaccccatctcattctgcgccataaacgtcctcgccagctcatcccctcccctctcggccgcctccatccagtgaatagccaggcacatcagcgccggatcactcctgacatcccccaccccgccgccgccgccagaaccagctcccggcgcctcttccttgtttgcacccgcaacaccgcccatgccttgcatccttgcctgggcaatcccagggtgatacctccccgagccaccacccccagacctgccaccatacttctcaataaccgcctgcttgaacacctctctaggcttgctaagcggcagcgtcgtcctctctaccaactccggattggacaggtaaaagatggcaagctctctctgcgcagtcgggatgccctccttggcagtaatagtccacatcctcgccgcatcagcaagcgaatgcgtcgacagcggcagcgggctcgggggcggcgacggtggcgaaagtggctccccgccggcagacaaaatcccagagttgtccgacgcggtactgcctggtccagaacgggagggagcacccaatccacccccccttgactgcgtataattcttgactatatcatccgccacttccaccatggtccggcagacatcttgcttgaggttcagtgccgcaatactggcatcccaaaaggccttcccacgctccgtcttgtccaagatggacgacgggacaaaagcagcgatgaactgcaggtcgcggaagagggtcttgggtcggatgttggcgtcacggaagagcatctggaggatgttggcaatcgcattttcgttggctgggtggaccgaggcgattgatcgcgtttccatgttaccccctccacctggggttcgtcctcttggtgcgctgtcaaacggtggcgcctgcatcatggtgtgggagcgacgctctttgacattgtcaagtgtctcttctaatggctggggacggcctccggtgccgtgctcgtcggtcgccgaggaggctgagcccatgtctgatcgagcccacgccaggcgtgcacgtcgagatcctgaattcaaggaggcgatgatgaggtgttcaagctcatagagcgcgttgagcttgaccatcgggttcggatgaacacaaaacatattcaggagccgcctgtaggccttggtaaagggaaactcgggcatggaatccttctttgattctcggtgggatcgaatggtctcgttagttgccgagctctcgttgccgtggacactgccgccgtgtacgctcccacgatgagaaccgccatgatgacttccgtgatggctgccaacgctctgggtatcggataaggccttctcgctaagatctcctgtacttctcttcctctcaagcacccggcgttccagtccagatctggccgacctcctcttttccttgacctgcgccttgcgggcacggcgctggattgcttcacgcctgtcaatacactcctgccccaagccttcaaaccacgcgtctgtttctgaaccacgggcaaagacaaggttacccaaatcggaaagcaagagactggtcaacgtctgcttcaactctgtgaggaagcgggacttttcttcagagagtcgctgttggtacactgtctcattggatgagatggaagtccctggacgacccgctgagtgatgggaagggagcggctgatggtttggtggatggaacgtagcggacaggttggtaacgctagtagtgggcgagtgggctcttgacacagcgctgggagaggtggcacggtgttggaatggggaccagtaggtagcgttggggtcaatctggtgaactggtgatgaggcaccaaaatactccgggccgtctagaacctcagacatggcagtgctagcccgcgagaagctgaaacggctggacgtgtcaaaggataagacgctcatgttctgacctgacacggctcgtaatcccctgtcagaaagggaaggaggcctgctggcggatcggaacctgttctccgggtcgctgatgacactgaccgaatcatcccagactgacatgttgtcccgatcccgatccctaccaggtttgcttgtctcgtgggtacggcgatctcgggcgtagagctcgctagaccacagaacgggtccatcgatgatgctatccccgacaagcttgctcacacagttgtcaacttcgcaggtgaagcggtgtatacgctcctcgccctggcagaaattctccaccccacactgctgcagccagcggcttgttttctcagcttgctcatcgcgaagcttgttggggccgccttggtcctctggtgccgccagcaggtcgaggatctgcgattcggtgcggaagatgtagttggacgcagggccgcgttgcattagactcttgatgcgctggaaggagttccacctgcgaggcacgcccatcgtcttcaacgccacggcaacgttccgcgagtcctcgtacggagccgagttgcgcacgtctgtaacgtaccacatcttatcccggagagcacgcaagcggcgcatcatactctcaatgagaccttctgcgcgctcctggctctgcttgagccatacaagccaggcgtcatatatctcgattgccgccgctgaccgacggatcgaatcacgaggacccctcgagaagatgttcaacaaggtggcaaatccatctttacgaagtgagtcagagcccagcgcgttgagttgctgcaaagtcctccagtaaaggtgtgcagaaacgaaatccgactgggcgcgagattgcgagcaggctgctgtcaacatggcaatgagcggcgaggaatcagctgagtcttcgagtcctttccctttgttgttctccggcgggctgtctgcgacgctactggcgatacttgctgctcgctggcgataggggtttcggctgcccattgttgtgatgacccggttcttggaccggtacttcttcaaagtggatgaggcacgattgctgaatgtttgcttcttggcaccgtcattttcaagattttgaggaatctcatattcctgtacaagcttcagaatcgaatctcggagctggtgatagtccttgtcaagttctggtcggtcatcttcggtgtcttcaccctcggtgtcgctagtctctgaggagttctcgtcctccgggtcgtcatctggatcaaacgtcatttgggtagaaagctgtgttccgtcgcctgagatgaacagcaccgcccaccgttcggcacaagggtggcagaggccatacacaacatcttggcccaaggcttgggtcatctcatgtatggccaagcgaagccgatatccgtcttcttcatagttgctgttctgcggctgctgctttggggtgcctagatctggaatcgggggcgaatagcgcggtgggctgccatcttctaaaaggggttctcgagaagtcgtggcatcgctgatgaaggactcggcacttgtgctgatgacagacatggtgtcaaagttagtgcttggcgccgtcctgaccgacattggctgtgagatggctgagaagcccgagaccgaaggtgcccctgagcgcaagctaccggaatgcgctgaccgcggtctgcgttcggggaagagggcgttgatcaatgtcgtaaggtcagctggactaacaaccaaatgggggtgaacttcggctgtctctcttagagaggtgatggacctggcaggcaaaaggcgtggcttcttcttgaacttggaggagtccttgaaccggaggtaaatgttttcgatatgttttttaatctttggcggtgttgaaacaggggttttgctcgtcagcatgtccacgacaaacttctgggcgtgcatggccacggttttcaagatcttttgccggccatattcagtaatgtgatattcggccatcatgccataggcttcggggtgaataatgaccccgagcaaccagttcgtaaagagatatttggtaatcaaccagcggcgggtgctttcgacatacttcttgtccagacgcttcagcatttctgtgccgagctcgatcagcccctccggaatgccggtcgtatcctcgtcatcaataacctcgaaaagctcctcgacagctctggcatagaattcctcggccgcaatctggtctttggaagaccaatccgagatgttgaaccgggttccgtgctggtcttcggcgcggtcgagcaaaaaggctccatcctcgaggattttcataaggtaccattccatgttggattttccggcccagtcacgcaaagagatccaaacattgagcacggcagtgacggtctgttcactccccgtcttctggcctgagatcaatcgagcgcacgtggtggcccatgtttcggttcggcgtttgtcttcggcgctgtctggtcctgcggaattagcaaaacaggtgtaaatcagagctgagatggggtcgtgtcgctggaaggaaagaagtcgttctatggcactgcgctccttgcccaggccgttggatgctccaaatcccgaaccggacagggtacctgagccacccgaggcaacacgggtggacgtgcggctgccgtgatacgggaggacggattcgatgggctccagggcttggtgaaagctagtaagcgcagtgagctccgaactattcaacgatgagatgcgcgttgccaggtagtcggggttcgtcctgatctggttcaagaaagtcaaaaacgtctctctagcggacgcagagagctcgctcaaaaacggactggaggttccagaggcaggtttagcaccagagaccgatcctgtaggagtgtccaagctgtcagatgaagtcaagccaggggactgcagaagctccatctctggctccaataatgcatagcggcgggtttcgtcgcagcttttccgaacatcgatgacggcattgaaaagagcagcaaagcccttcttgtcgtccccgcggaagctgtccaccaaggttctgtgggccgcctcgccacatctcatcagacgagcagacaaggcggtggaaatcaagcttctctgaagacggatgcgagtgtttgcgcgcttgcgctcttggtacttggataggcgcaccaggtgagctagctcctccaaagtggtcctgtcctccaccggggccagagagggggtggtatagatagatgtatccttcagcaagggccgtaaaaagttcatcttcccaagcttgtcgtccggtcccgagtccaagctgtcggaggagtcgtggggcggctgcatcggcacaggtgcggtggcctggtcgatgatgggcttctgaacagacgagcgcctggacaggtcatcggagcgccgcacagaggacgtcatggtatctcttgccaaacgggacgggcttctggacctattgcgcctcgaatgggagatctcgacatggttgtcggacggggtcggggtgggtgagcgtgaagcaggcgttgcagtattcgaccgagctggactcccagacatggcagttagcatgtgggcctcctcttgtcttgttcttgaccggtgaccagtcccgtttccaacatacacggtgtcgggcgaatagcgacgggcgactcaagagaacgctgcatggatatcataatgggcccatgagggggctcgagtcgagggttgcgatcgcccatgtactaccagccgagtgctgatagctgtgggaaggaccgctcgactcggaaaaaacgcgagggcgggtggagtgcggtctcgtggtgtttatggacaaatcgggcgccgggttgggctggaggttgtatacacagagagcaggcgggggaggggccgaggctggacgaatacaagatatcaatcaatcggcagcaacaaatagtgggtaacaacagcagcagcaacggcgacgacgagagccgctgcgaggacagttatgtatgtataggtagctcgagcctcggtcgacttgcgactgggaacggggtggcctctttcaagagtgccgcgagaacatggtctcgtcagtcaacaaattaaaggaggggcgcgtgttggcgggcgatcttgacgatgacgggaaaggtggtggaagcgttggggaaactctatggaacgggtgacgttgcgatgaggcgctgctaggtaggggacgaggtaggaggtaggtgtcgggagagggagtttgtctctggctgtcctgtctcatgagagagagagcgagaggagagcttccctcccatctccatgcagcttccctgcccttcttccaggtgtgtacatgtcgatgcagtggacgtcgaagcgtggggtagcgggctggcccaattgggttacgcagcccatctgccccatcacttgctgtctccacttgacctgtgtcaaccataccctgtgagctggctggtcaactgcgccatccactctgcatctacaactgcacccgtccccgcgacactggcctcttggtcctgctggtgctgctgctgctgcccgactcgtgccccttacttcagctctgctttcccgcctgccgcctgcgcgtcttcttccttctgcgtcataagactcaagaaagctcaagagggcctccacctcacctctcaccgtctcataccgactctcgccgaaagcggtcatggtgagtgccaacacacccgccagcaaagagtagacgcgctcacgagcggaaccccatcccaccgcgcgttcacagtcccgtcgtagtggtggcgatggagacctgaccatacccatacgaagtatacctcagttgccgcctccccgaaacatattatgcgggaaattattattgtctcccttcgctgacgcctcccacctcccgtcctgttgcaatttttttcctgcttcgattcttcacttgatgcaggaggaggggtacggaggagggtaggtcagtcagtcagtcatcaactcccatggccacagcctggtgcgctggccttgcagctcgccccgccttcccttttgtccagggacccatttttggcggccggcgcagttcaaacagtccaatctccgccctccacgacccaaaaaccacccggacggaacctgcccgcatcgtgagcccagcattcgcctggtctgcttcaagatgccaactcagcttcccatcgtcccatcaccaatcattccccgccactatttcaagcatgcgtcaacctgtttccttcctggccttgggatcccgcgattcaggggcgatccagatcaatcctctctctctgccgcatgctgtacatacggcacatgctacctactgctacggcgagaaccgcccaccccccgagggtctggtttgacaggctgaccagtcccatccattggcttcgcttttctggtgtcacgagatcattcaggtgcccatcttggatcatctcttcgatgtgtagccatggcccaacccctaccctgatagggacccaaacctaggcgcgagaacggtgaggtctgatctcaggaaccacaccacctcaacaaggcgatgagatgaactagtggcctagggcgagacaacttaccacgcgtacctggacgatctgttgttccccaacccaccgtgcaaaacacagcggggcctcatactttaacgcaccatctaaggcaggtccctgatgctaggtaccaagtaagataaccacacacctctgtcggcttccggaaagcgaagcaatccatttattgtctttctgcatctctaggccgagtggctgctggctttcttttctgagaagatgcagctcgccattggtctgccggctgccgactatcaggggtttcaaatcgcttcatatccaaccatttcaactgggttgagctggatcttagctcgtatcgccctgtgtggacagattcgtctttttttctcgggcggctgtggtaaatgacacaactgtagctcttgttatgtcgtgcatattctcacaaagcgtcacaacgacaccccctttcagctttcccatgattttgttctggttgttttattttcatctgaacctgtaattccggtatcactgctgcttgttcccttgtggatgtgtaagacaacaggccacgaggtcgtcagacgggtcatgggtgggtggtttaacgtaggacgaggaatccctcgacaccacggccagcaacgtagacagctttacaagaagaagaaaaatgcgaggtatccgatgcgctggacatgcacctcgcccagtttggtcttttctagagcgtcacaacaggaaacaagaaagaaaggggtcgccggtgtgtgtgtgtggtgtcgtgtctgtgtatgtgagttgagtatctctgtgataggtactttggaccacgagtgtgcagtgcgaaggatatcagctgggtacaagtgtaaggcttgagatggggaatttccatgacggtgttttgtccagttggtgtaagcgaggaacctctctgcacaaatacatcttggttgtgggagtgtatcagatggcaggactgccagagctgtatgatgatatctctccagaacaagtgagctgtcggtatataatactatggcattaaagctacctacccacgttctcagaacgagatatttctgaagctgatacatgcgtgtccttgagcaagttacacaaaacctggtcaatataacaaccacaccagaacagggtagcaattatcgatatccctgcacacttcgcagaaccatctactcttccaataaaaacccaatcaaagcccccccgagggagaatatctctacatgacatacatacagtacataactcaggtacaaagcatccatggatcttttccaccacccccttccccacccacaaccaccagccaaccgccctcagttaaaaccacccagacgtggccactctggagcagctaaacgctggcatacataatacatcatgcaagtgagatctcattcgttttgacctacacataaaccccaaaaagcatgtcagcaagaagaaaacaaaacccgccagctcacacacatggttcgacacccgcccccgcgccccatatccgccagcgcaggtcgcatatccggccgcatgagcaattgtcccatctgccacccatttccatttccctcccccaccccctctccctctcacttcacccttcaaagctggcccaagattatcccatctcacaaagagaaaaaaaacaagccatatgacttcaggttcacagccatgcaccggctcctggtaccctccgtcccaatgccatctctgttacctcatcctccctccaccagcacatcacacctcatcaaaacaccccaaaatgaaatcaaggtgactttacaactatgcaccagccctccagaactccttccagatgatactacacacgcaaatccattccatttctcaaaatctcttcctacatccacacctaacccccttaatcccccctcccaaacctgatatcaaaatccttcaaaacactcataatactcgccgcctcaacctcaataggcgccaacctctgccccccaccattcctcccccccccttgtccaccgctccccggcctgggaaccggcagcgccttcaacttgggcagccaagtcccaatctcatccgccgcctgatcaaaatgcctgtgactagccagcgtcttatacgcctcagcacaagacagcgccaaagggaaacctgactctgacgcagaagtctgcataggaggaagcggctgcggtgcggcagattgagaagcgtcgctgttgccagacttgcaacatccacctcctggtccagcaccgccgcagcacccaccaccaccgctggctcccgggttgttcttctcaaagttggctgctagggacctacaaaagaggcctgacttgggatcggaaagacactgagcgcaggtacccgggccgttggggccgcaccgactcccggagggcttggcttgggtggcgttggagttggtagaagagcggttctggtttgcccgtggaccaggaagcttgatagcaccggtggcggtcacttccataggtattgggacgacatcgtcctctgatggcggtggtgtgtgagtctgtgtttgctcggcaactgatggtagtggttgttggaaggacatggggttcatgagagcctcagcacacatgcagtatgttccatccttgcagaagccgcacgagtccctagcctcaagcgacatcatgggctgtaaagactgtggtggtggttgggtgaccattggaagtgacattctgttgtccttagcaaacatggcggtaaagtctgtttccataggtattccagcatccgaacgatgccgtttctcctcgggtgccgaaggtggtgagcttggtgagtgcggtcgtttgaggtcggacattctgagggcttcctccaaacattcgcagcttgacccaagtgtgcattttccacatcccatcgctgtgtcggtgtcttgaagcacagcttcagcacatgcacatgacccaaatgcttgacagccaccacaccctagaggcgccatcatttcgtcgggaggggagatgatgttggagatggaaaatggttgagtggttggtcggggttccgcaatgggcacagcacttggccccgagctcttcggcggagcaggctgcaaaggtcgtctgggctgtgagatattggcaagtggattcgtttgaggctgtattggtgccggaagacgtccatgatttccagttgacgaaggtgactgagaatcccatgctgataacattgagttgcgttcttgtctctccttgtcaagctgtgactgcaaccactggcaacgagatcgtagtgtctgtctctcggcctccaggtgattgatacgctcctgaaattcctggacgacccggtcgtgctcttccttctgctcatccaattgctcctccagctccccaacccgagcagccctacgctcacgaaaggccctctgtgcagctctgttttgagctttgcgtttggttggtggagtgtcggtggcaggttttcgacctggcttgggtctgggaggaatgacccactccttgctggtcatgctcatggccataggttgttgccctgggcccggtgacataactccaggcgacgccatgttcaaaggggttgaggctttgatggagggtggcctgttgggtgcgtttgggcggatggcgatgggaggcgctgacacggaggttgacgatgtgggagtggagacgttggacggagaggccgcagatgcgggggtggaggcagggctggaggaatctctgccgagtgtcgtcgtgatggaaagagttcttttgtcggtgttcccaagcccgactggggaagcagcggcagcggcagccatgattactggcaacggaatgatttgacggaccacgagggttggtggtgcagaggtcgaggactgtaccgaactagtggcaactgactgcaggttgcagccgaattttatgtcaccagtaaaacgggctagggccgaccgtttagggagttctcctcggtatccgaaaggcagggagatggcattcaatgaggaagtccaagtttgatggtgtcgaactgcgagaatgggttgtctgtaaatgccgcttttggtatgtgacgagtcgctccgcagtcaaggagaattttgacacgagtgactccaaagttgttcgcaagatcactttagatggcggcgtcttgtttgagaaggaggttgtgagtgacacgtgatactgttcaatcggtgtgccggcacagggtcaagtatcgagctgacgatgacgatgacgccgatgttgtgggaagagaattttgagggtcttgatgctgaaaaattgaagcagacggaggaaagggtcttcttttgcgtcaaccgaagacgcccgggctcagtgtgggctagcgaggccggagttttcgcccaggccaaggagtctgagggctttgattcggtaaaggttgagagatggagatgtcagtcggcccactgatttgattgataagattataggatcgcgctagatccaaagcggcctagcgaggggtggtggtgccatgcttgcgtcaaggaaccccacggtcgaaagctgagagagggtcaccgcttcgacagcagatcccaaccggaacacggataatcacacagtcattacttcggtcaccaccggaatccgctcggtctatcgcttgatgattctgtggttctctgctgaagttttctattcaacatggtaattttccttggcgatttgtcgagccgttcagtaggcgagcgatatcggacatactgcgacgtctttagaagaccatcagcaactagcgcccggaagttctggttcgcccagaaggaaaggctgaagaggacactcctcgagctaattgctgcccgtaaatcatgtgggggctcttggagcaagctttgcccaggtgattcaggcgggcctcaagaaggcgtgcctgactgaggtcaactcgaattctgtgtatctgtgtaagagaagggagcttgggtcaatgctgccaccacaactgaaagaaagctgtattagctaccaacatgatttggggaataccaacttgagtgtctcatcgtgccatctggtattatcctcatattcacaatatggctgaccgttaactccaagctgtcatgcagagttgcaacgcacgggcccagcgtccgccaagacatggaacatgtccagaagcccagcatcgcggtccgaagtaccatcaacattctgtcaaccaaaatcagccaactcccaccgtcgaccacaaacaataaaaccaacaaaaatggcccaactcggcctccccccaaactcccgcccaacatcctcctactcaaccaacctcaacctctactcccccccgtcccccaaatcccaactccccagccgccgctcctccctctcctcctcggccaccgacgacttagaaaactcctcctcccttcccttccccgccgccctctcccgtcgcgactttctcgctcccgacttcgaccccgcaagctacctctccacccttcacaccggtggcccagcctctcggcatcaaaccctcgaggacctgcgctctgaactccgcgatcgaagctctgctatcagtgccgaactgcttgaactggtcaactcgaattacacggcctttcttgggctaggggatgagctcaagggcggggaggagcgcgtcgaggatgtgagagtagcacttttaggtttccgaagagcggtagaggaggttcagtctagggttagggagcggagggtggaagtaggggggctgaatcaggagttgagggatgtcaagggggcggtggagacgggcaggaagatgctcgagttggatgagagggtgagcggattggagaagcgattggcggtaggagggacggggcagcagcagcagcagcagaaaagggatggagatagcagtgatgaggagaattgggatgatgacgacgagatttttgggagcgatgatgagcagactcaggacgaagacggtgtggagtttgtcagtagcaggccggcgaagctagctgctttggcgagggagtgtgtgtatgtggatgaactggccgaggccattggtagggatcttccgtttgtgaagaagactgacgagaggatatttcggtgtcggaacacgatactgctcgacttgagcacagccgtaagagaagcacggaaagctggagtcaaaggtcaggggcgtgttatcaaactgttggcgatttacggggccttggatgcgcaggcggaggctgtaagggtcctgagagagaaatgatggtctcagttcaaaatccagggggcataaaaggcgcagagcgactggcatcaagatacccaattttccaggatttttttttaacttcatacaaggattatgatacatggcatacatctaatatacattgaaaaacaacaaaactacatgacagtagccaggtgttctggcttgaccttgtcgtctgttggggcaaagttaccgttcaaactgatccctgggccatgcgttgtgctcaaaacaacctcgtcaatagccttgggaatgttgtcgtccagttggttgatgttgtctttgagcttggacatgaacgccttgatgttgtcggcaagcattttgggggagaaaccgagctggcccacggccattctcacaacaccgcttctttctctgtactcatccgcgccaatcaactcctgcatcgtctccttgatgtcgctggtaatggttccacgttttgggttgggcatcagattcttgggaccgagaattctggcgacctgggctttcttcagagcttcttggctgtcggtgtggcagatcaatttgttgaaggcgatctctcctcgtcggatggcctcgaataagctctcctcacccaccgccacggcaccaagttgttgagcctcggtcgctagggcgctgccctcggggcagatgacaccgatacgggtatcggtcttgactgggaagggcagacgaatggcacttcggagaacgggaccgctcttctgggtcttgactttgacggcgaggtcatacttgacggtggtaggtggacgtccaacttcggcagcgcggaggtacctttatggacagtaagcgacaatacgccggcatggggtgacattgggaaggaagcttacctcatggcatcgcagagtgtgaactgctccattggtgagagatcatagctgcggaatgtcttataggtcttcttcttcttcacgggcttcttgcgcatgcctccaccaccgccaccagacgcatgccggacctgtggtgtcgcaaccgatggcacgaggaattttggtattgtcgaggcgaccgttgacctggctggtgtggacaggctgagccttgccagagaggcaaggcaatgatgtgtggaagccattgcgagctgtaggacacaaacggcgacgtcgtgagcctccgcctctctctgtcgctgtcggttgcgctgcttcagaaaaaagttggaccccggcccgttgaggttcgttgccttgaatgttaggctcaaaccaaatgctcagacaaggtcctgagagcttcggttttcaccgccttaccaaaaccgttggcgctcgcggcagaaaccccgcgctgggacgggtgaatgtggggcttttttgctgcccctccaaaatcccaggctatcatcggtgactgttttctcatcacgtcccctattcctatactcaccacccttacccaccgtccaccatgaagctggaagagctccatcccattgaggccctcctcacggccgatttccgctcaatcgagcctcgtcttcagtccctcgataagcatctcatcctccgcacctacctccatggctacactcttagcgagctggacaccaaggtctggcaggccctccgcggcaaccgcgccgctttctcctttatcaagcgcggtagtcttgtcaacctcgctcgctggtttgagttcatcgaggtgatgcaccctgagatccaggacgagatcaaggccaaggatgctgctgccaaggcgaaggtcgctgctgccagcaaggccggtggttcttatgctcttaatctgcagaatacaggtaggttgatatagactgtcaaatgcgtattggactcattgtgctaacagacatgaacagaccagggcgttgttaccagattcttgcccgagccttcgggatacctccatattggacatgccaaggcagctcttctctcttggtactttgcccagcagtacaagggccagcttcgcctccgtctcgatgacacaaaccccgacaaagagaaggaggaataccaggatgccatcatcgaggatcttgccatgatgggcatcaagtgcgataccctcacctacaccagtgattactttgattatctttacgatatggcgatcaagatgatcaaggagggacatgcctatgccgacgataccgaccaggaaactatgcgcaacgagagatggaacggcatcgcttccaagcgccgcgacacgccagtggaagagaacttgcgcatctttgaggagatgaagaagggttccgaggaaggcgtccgctactgccttcgcgcaaagctctcggtcgacaaccccaacaaggccatgagagatcctgtgatctaccgttgcaacgtggacacgcctcatcaccgcaccggcaccaaatggaagatgtaccccatgtacgatttcgcttgccctggtgagttttgtcatttttcttttgacctcttctgaccttccctttcgtcgttggggccgttgagatgagaaagacgtgatattgacagcacctgcagttgtcgacagccacgagggcgtcacccacgccttgaggtccacagagtacaccgaccgcaaccctcagtacgcctggttccagaagaccctgcagatccgcaaggtccatatgtgggattttgcgcgcatgaacttcgtcaagactttcctctccaagcgcaagcttgccaagctcgtcgatactggaaaggtttggggatgggatgacccccgcatgcccaccattcgtggtgtcaggagaagaggaatgggcatcgaggctctgcgcgaattcattattgctcaggtatttctctggccttttatctccgccgtcgcaaaaattaacagcaaaacagggacctagccgcaacgttgttaccatggactggaccaagttctgggctaccaacaagaagcacattgatcctatcgctccccgccacactgctctcctgaagaaggatattgtcaaggtgcccgtcacaggcgccgaggctcctgctcagcccttccaggaggacagacccaagcatcccaagaacaaggatatcggtaccaagaaggtggcgtttggtcccgagattctgcttgatcaagccgatgccaagagcttcaaggaaggcgaggagatcactctcatggcttggggcaatgcctttgttcgcaacattgctgagggtgaccccatcacctcgttgacgtgcgagctcaacgtggcaaagggcgatgtcaagacgacggagaagaaggttacctggctcgcttctagccagactcttgtgcctgccgagctttgggactttgactaccttatcaccaaggacacgctgcaggaggaagacaacatggaggacttcctgaaccccaccacctctactatggaggaggcgttctgtgatgaagctacggcccagctcaagaggaacgacatcatccagctggagaggcgtggttactaccgtgtggacaagggtctcgatgactggaaggagggtgaggagaagaggcttgtcctcttcaacatcccgactggcaagactggatccaagtaaggttgtatgttctgctgtcggtttgtgatgggaaagtttgatagaatactagatgtgtcctacaagactggcttgtcctgtgtgttggcgccaagatgcaactgctgaagtgttgtggtgaatagtatcactttggagagtaaaataaacatctgacagggcaacggataggggctggagcttgatgcatgcgccctgtgccgaaaaccgtcttggtgtgccgaaggccgtcttggcaacttggcagatttgtaggcgaaaatgcgatacgccatccgttttttttcagactcgtcttggggtaagatggtgcaactcatgtttgacccaggtctgatccattgaattctcacaaactgtcttgaagtccttgttgagctggtttgacattgcacctggaccttgaagctttgggagctcgggagctttgttagagcaaatagctggagaaaatcccggatccacccagctacaccagattagcgagagctcgatgctccatcgtcgatcaaggttagtgcttggcacctgccccccccaatcacattctttacgtcatcctccacatccaagacattccaccaagtcgacggctggccgcagccctgtcacgctgtcaaacaagcccaattttatctgcacgaccttgggatttttatccattctctaacttcttcctgtcttctttttctttccgcaacttcaacgaggactcaacggctgcctctctcatactgcgctcgcaggtcgaaccagctcttagctattgatagctattagaagctaaggtaccttgattggaacaacagcacgcacaacaaacctctcgccaaaccggcaacgcaaaatggcctaccagggcggtgaagccgctaattactacagcccacctcatggcagtggtggtgggccgcagtatccccctccaaacaactcgtacgaaatgcagcaaccgcagaatggatactacaaccgacctccgccgccgcctcctcctcctcctgctgggggtggggggtatagtaacgtgccgatgaacgatggggggtatcacaatgggtatggggcgccaccgcctccaccgccgccgactggaccagatgggaagatgggacctcccccgagttatgacgaggtttttgcggtgcagaagccaaagtggaatgatttgtgggcgggggtgttgtttttggcgacttgtgctgggtttgtggctgttagtgctatttcgattcagggatatggtatgtattggtataatggatgattgggggttttatggctgacattttgggggtgtagctgcgactcgtaatatcaactcgggcggcctcaatgggcagcggaacagattcgggttgacgacgcatacgatttggctgtttggctgggtgctcataacggctattgtgctcagctacgggtacatgtgggttgcgaggaagtttacgaagcagttcatctggattacggggattctcaacgttgtgcttggttttgcgacggccttgtacatgctgtcgagaaagtactactctggcgggatcgtttttttgatctttgccatttttcagctgatctgctttatcagctggcggtcccggattccgttcagcgtgctgatgctgcagacggccattgatgtggccaagaattttgggcatgtttatcttgtcagcgcgattggtggactgttggctacgttgtttgcggcgtggttttcggtgacgctggttagtgtctatgtcaagtatcagccggatccgaataacccggcttgtaggcagggcgcggggggatgttcgagtggaaaggtgattgggctgattgcgtttattacttttgcggcgtattggatttcggagtggttgaagaacacgattcatactactattgcgggggtttatgggtcgtggtatttcaactcgaggaactttccaacgggggtgacgaggggggcgttgaagaggtgcttgacgtatagctttgggagtatcagcttggggagcttggtggtggctattatcaatttcctgaggcagttggcgtctgtggcgagggctcaggcgtcatcggatggggatattttggggatgatattgtggtgtattgtggggtgtcttattgggttgttggactgggcggttcagttcttgaatcggtacgcttttgcgcacattgcgctttatgggaaggcgtatgtgccggcggcgaaggatacttggaagtatgtacactctttgccccttttgtcttctgtggagtttactaacgaccatgaaacaggatgatcaaggaccgcggtatcgacgccctcgtcaacgaatgcctcatcggccctgtcctcggcatgggcgccatgtttgtcgggtacgccaccgcgctgatggcctattgctacatggtcttcaccaacccctcgtacaactctggcgggggcttcacgccggtggtggttgcgtttgccttcttgatcgggttgcagatctgcaatgtgttcaccaccccgctcagcagcggtatcgacaccatcttcgtggctagcgcttgggaccccgaggtcatgatccgggatcatccggatttgtatcacaggatggtggcggtttaccctgaggtacagcaggctattcacgcttgagcggacgtggaaacgtttgggcaaaggagtagggagtttagtgctatatcgtaagggaagagcaaccagaatgaaagggggtggtggtgatagtgttagtgtgaaagtgttgctagaaagtaatggtaataagtcgatcgacgttcactgttgttctatgattgcttgtccaaccaacagaggatagtcccggctctacatgcccgaggcatattccaaccgtcttgtttcccgcacagcatgggtctgatactgcttcttctcactccagctttgactggttcttcctccgttccagcagcctcttttcccgcttttctgccgctataaattcagggccgaaatacgtaggaagtgggtgggggaggtgggggtcggttgaaatatcaatcaagagatccaacaccttgtcatctttgtcactgtcaaaaggagatgagccttcaaagtaaaagtggcctcgtttcccggaacatgaaacctgttaaacggatagccaagccaacttaggaaagcccgaaaagagccagcccagttctccacaactacgtttgtaacgcgggttatatccaaaacgacagaacgtcctggccatttaaactcgaatcctagcgcccgtgaagcctgagaatgtcgtggcctatgaggactacgttgtgtggttgggggatgtgcgattcaatagctcacggatatgaaaccgagattgtttgcctctaaaagtctgaaattgaatttggtcatatggcgctcatatacaaactgtgatgtatagtcaaggctaaaaaagacgtgatcaataggtagttcagtgtcatctatcttctcaattctctgctttcataagacccaatccctattccacgatccacgacgtggatgcgggcatgcagttgccataatcacatatgcaagaggatcgaatgacaaaaaaaagaagcatagtcaaatatcatcagaagctacctctgatgcaaacatttgtatacccaattacacgaccgagccctttcctgccatttgactgttgccttgagcctcgcctgtgccaacctcgagctccacacccacctcatcccgatcttgctctccctcaagaacttcagactccgcagtcatcctagccgcagtgtctacggtcttcgaaaccgcaaattgaacctcaaaactgcgcgcatgcacatagagaggagctgccagactatcctgccgtgatttatacccatgaatcttggccccctccagagcagccttcatctcgtcaaacgcgtcataccgccggtcgatacgcccccctagatacgactttgccttcctaatcatcaaaacccacagacgccgcttggaggcaaagtcccgctcgaggagcacccaaacggcaatagtgaagaggatcctttctttcaaggccatgtctttaccaaacatgtggtctttgtcgtgtttatcccggagagtacgtagcctcttggtaatttctttccccagtatatcacggaggaggacgacatcttcgttgtgttggcctttgttgtgtttagacaagagattgcctgggtccttggtggtttcttcctcgaggaaatcccgcagaagaatgacctgttcaccgtgtcggccctcttcttcctctggaacggtgataatagaagggtgaagatcattgatctggccggtttggactgagtaccctctggcaaaatacccctcggcggattggaacctgagaagttcagaaatgatgcggttgtctgtccatggcttattgtcgccactcttgggttgtgtaactctttcgtgctcgtctctcaccctgcgacgcctccgccgcctctccgtctcctctgggctctcctcgatcttcgctttagcctcctcgtacgccccacgcgcgtacattgggtccgttggaagtgaatcgggagaaggtttgccccaatggacatcggtatacaaatcgatcgcctgatcgtcttcggactccaaattataatccggaccggacgccggtttagctagtatatttgggatctcttcaatattcacatcaagtgcgtaagttggactgcttgtctggggtaatgtcagcccacatctcaacttcttgagcatggcgtccatcggaggtaaatcagaagaaggtgcccacggaggaagatacgccgagacttcaatcgcgtcatcctcttccgactcccagctatatgtctggtcgcgttgttgtggaagcgaggaggcattaaaggcataccggcagcattgtggttgagcttgtatacttttgtgctcttcacttttcagattaagtacttggacgaacccccattcgtcttcactgggtatggccgttctgtgctgcagtattccacctgagaggcgacgcattctcggtttaaatataccttctaatccgttgtcaggaacactggtattgttcgtctctgaatcatctgcatcggtgtcgtcgaactcgaaaatagggccaggatccctcggaggatctccagaaagagatcccaggatggggctctcatttgaagcgcccgcccctggcgcaatatcgctctgtttcttgagagtattaccttcagggtctgcagcgccagtggacttccgcatcctgagggagattaggtggtcaggtgcaacgacagactgtgggtattcaaccagtcgtaattttctcccgttcgaggaaggacgtcttgaaagttgcagctctggaggtctcatagggttgctcagtacagaaaagctaggaggcacaggcctttgcaagtgtcgcccggctggaagtccgaacaagtcgtctgagttcctgggtgtagagacaagctccccaactagaagcaagccagaggcaggcaccgatgttttaccactatcgaccatagtaacgccagcaatcggcccgtgtgattgcaacaagtcatctccaggctcatcaatagcctcagcaccgccttctgcgcaccaaatatcatccggctcagcaggacagagctcctctttcagaaagaagctcgtccatttggaaacaagtgaccatttgcagccaatcttctccgcctcctttcgtactctatttctctcgtcccaagagccaggataggggcgagtagagcccaggtgaatctggctctgacctcgctccagatcattgagcagtgagcgggcggcaagccgatgaattgttatgcttggcttctcgagaagcgtcacaggaacatggaaggtcttggtcctgtgggcagtatcggctttgagtgtaacgtcggtgatgctctcggatgatttgaaggaatcaaagaggaaaaagatccggcttctgttgaacgggctgagcgtggatatgtctgctggagattgttcggcgttgtgaatactggaagctgtcggacggtcagtaaaatggtgcgaagtatctgagagacgagctgttgtgtaaataccttgcttgctgccatcacccctcatgatattgacctccaaatgcataggccccaagtgatcggtcatcagtgctgcctctgccatgctgacaatcctatcctcccaatccccttcgctcgcctctcgaaccacttcggcatatcctccaccaaccttggcgatgccctcaaccaaggcatgggagactgccggaccaatacctaaagcaaagaaccgtatacccccttcagtcaagtccctctgtttccgaatgtactcgagggtttcgtccaggcgccatgtctctccgtcagtcaaaatgatgatgtctgtaggcagtcttttgtcacgcgcagtcacgatggcctggaccgcgggaagcagttcagtaccccccatgttggcatggaagttggtgtcaacccatgaagaagcggactgatacgatgcttcgccataatccaccgaatgaggctgccacgacttgtaacttgagccaaaacaccacacattgaacttgcggccattgggaatacccttcaggaagaattgcatggcagctctgagcgaggttaacttgtcgtccatggaccctgacagatccgccaagagaagtatctcagtctgatcggtaggattggatgtgcgcgtggtaaagccaggcggaattgtcaccatgagtgcctgttgattgggtagggtgggatgcttttcgatccatgcttgtggtgattcggcctcatcattcgggcctcctgttgcgatatcaaggacaaagtcgcgatcgagaaaagcagagcctgtttctagtttcaccagggctgtttcgacactacttcgggtgtcttcaccaaccaggtcggcaaaggaactggccgcacgtgttcccaaccagttttcgacagtgaccttgtgtgttgggctgacgattgaggcaatcttgccggcttcaactacttcaatctgtatcgtgaggccttctggaatggaggtggaggcagcattgttataatcttggggtttgtcaccgtagcggcttgcgatgcaagttggaatcgtcagtgtcgtgatccccttacgatcggcaaagtgatgtttgagaagggtgatgtaggtgacagtgaccctgatcttggttcttgctgggagatttccaaggctggtggtgaatatctcctcggtatcttgctcgagcaacgccgctccagtggtacggttgcggacatgctgctggaattcctcgcgggcttcttcctttggcttgacattgccagccaagactttgccatgaccgatgcgacaatggaagcctgtcacggtgcagccagatgaaagaggaaacgtgtaggcggcctctttgatgatgttgtacgagtcgttccagaagagctgcgtaactgtgatgctggccgtgtcttgaatgacggaggcttcaatcgagatggagactggcgggagcacattccgaccaagagatggttcttgaattgtgtaggttgggatatttgaatgtagcaatggtggcgcacaggcggggtgtgtgtgaaaagcctgtgtggttgttggatatggcaggtgcaaattggtctgcagggcatgtgactcgtgaaacgcaccttccaattctgctggaagaggctctcgaggatcgtatctcgagacaatacccgcaaatcgatttggtcgatatccaaacatgttcagaactttctgatgataggaccccaacgagaaaaaaccatgagcccagaggggttgccttcactttatcagtctgtcccaaggcatccatcggagccttatgggacgcagtaagaccccctcacctgcgccatgattacccctgtcttatgcagagacatttaacaccggcccccaccggagatggttggcgtaacactctcgggctgtgcatgcaggtcatcatctacttctactaaccccatataacatccaagctcatcatgtctagctaccgctcatctccttccacttcttaagctaggcaccagacaggatggggtcgccagtttcaattggcgatatcatcgccatgtccaagatctcttggaagattgcccaagccttcaccaacggacgcaagtctgcgcccattgaatttcgcgaggttgagaaccagctctactccctcagctcggccctatcagctttcaaagatgcatgtggcgatgacatcgctgcagtctctatcgagtcttcgtcacttcccaaccgatttcaagacaaagaacaacacgaaggtctgcagagtgtggattggctgctgaacagctgcaatgagacgctgaggcatctcgagaagctcatcgacaagtacagtgctcttgcaaccggctcaggtcaggaaaatccagagccacgctttcgacgatggagtgacaccttgctcagaaactacaagaaaattgcttggacaaccgaggccggcgacattgcaaccctacgaagtcagctcctggttcataccaacagcttgcacttggttttggggaccatcgtaaagtcagtgaatcttcaatgtcacaatttcatgaaagatttcgttctaacatgatcaatcatagctcccgtacttccagaattgaggaaagtctcgcaacaaacacacaaatgctcacagaaattcattcttggtggacccaaaatctcaaaggtgccaccacttctaccgccgagagccagtccctatcgaacagttcagcaaagaccatcggctcaattaaatttcaggtatcgcttgctgtggataacgcacaacagctcatctgtcctcgatcatattaccaggaggacttgaaccattggacctctcaactgttattgtgtggctgtgataaggctgccgaccaccccaagctcagagacattggactgtcacccataactttcccctttaaacatggtgggaagaataggtcatgggtgctctacaaagttttggaaaggtcgacgaaccgtctggtatctgtaaatatcagtgatgttgcagttgaacgtgaatcggcaaaatccaagcttactcattgccattatcgctaacccggagatagatatccgcgagtttcaagaatcattcatcgatcgtcttgctgaagccactgcgagatcaatgctgcagcaaggcatgagcaatatgcttgctcacccagtacctgataacacagggattcggactttgtacacgcaaaggttagctcaagtcattcatgccaccagagtagatattgtttgctaacgccctaagcttgattagtgatacaaagaatctctataaactgatggccgatattacctttggcgtcggccacagatccttggtcaagaatgggatcagtgggatttcgctcttgcaatatcgaagccttggtcaaagcagcgaaggccaaggggaggaatatgcagagctactggtctactacaacaaaagtgaagatatcacgaaaagcattctcaaacgtaagagttcgaggtgccagaatcgcatctaactttgctaacgaaacatagtacgtcatgacacggtaatgaaattgatcgaaggagatgcaaggattgtgttggacgaaattgactgctatggcttcgttgatgacaaccaggtcaacaagctgaccagagcagaggtttcattccaaatgatttccttcgaaggtatgtaggcaaacgcaaacagcggagcacgccttctaatcgaaacacagctgccaaagcactctaccagaatatcgaagacatgagaagggaactatttatccagtctctaagctcccctaggcgagacgagattgtagcactacggctgtgagtggatccggtgtcttattaccgagttgatgcactgacttttgttttttcccagccaagttgcgcaggtccagactgaagtggtcttgatacagaacgcagagctcttgatcacccgagacagagagggaaaacagaggctgattattgtcagcgagaacaagtgcacaatactcaaccaagcccgtaagtttgtttaatgtccaaacttacgtgggtttggagtctcacaatcatggttttacagtacctgatgattgcttcaccgcggttcggaaaagtcccagtttcagcgccccaacatggcttgttcagatgaaaagtgatggaaatcaacaggtatttcactacccgaagggatttcgaatgctcaggtttcatgacaataatggtgaggatgccatcccgctctcattgtaatctgtctggctaacccgcttttagctacaagaatgtttcaactggggcgcgaggcactctctcagagcgagggaaaagcgaatttacccatcaggaatcgacctgatgaaagtgggggccagattgaacttgaccgcagtgtgtgagatgaccgttacttctccggtgaccaacaagattgagatttggcaatcaatcgctgtatgtaaatctagtcttgaactattggcaaagaaatcctgacccgtaagacaaaggaaacgtcaatcataatttcatagacatcataaggcccagcgtctaaccagcacctcacttcgcctgaacaaactcaagccctcacagtaactacactctgcccaggcactctcattccaccagtcctcacctgctgtctcaccggctgagtattaacagccggaatcatcacaacctgctgttgaggctgcggctgagctacagtctgtaaaacaacaaactgctgctgctgctgttgtggcctctgcacgtgctgaacaggcacagtaacaaactgtgtctgcggcctctgctgcctctgctgctgctgaacaggccgttgaacaacctggctaaccggcctcacaacctgctgctgtacttgaccaaccggcacagcaacgaactgctgcgtctgcggcctctgaacctgggtaactggcaccgcaacttggacgtactgctgctgctgctgctgctgcacctgcaccctcacccgcagctgaggctgttgctgaaccctaacagcctgctgcaccggcctgccctgcgcctgagtactaaccctcaccttctgctgttgttgctgcccctgaccctgtttaacaggcctcacaacaaccttcccctgccccggcgtgggaaaagcaggcaaggcatccgggttcggattcttgacgatctttttcttgccctttgcaacctcaaacgcgtcaggtaggtagcttatcgtgcctgcttgcaccccgctagggctgggtttggtcaagtacatcacatttactgttttgaactgtctcggcgtcacccccttctggggaggtggtggaccacgaggagcggggacgccttgcggggcgaggccggcgatgtagaggtcccattggcgttgggggttgagggcgaggtaggaggatcggtagaaggattggttttcgcctgtaggtttggcgcgacggaggtactcgcggcctggagggggagcggcggtgcgtttgttgggggtgacgactttgacggctttggtggtggtggttttgagttttttccaggtggaggttcggcggatgaggacgccttgggaggggttagtagggggcttaaagggagggaaaggggaagggggagacgtgccgattacttgtccatcttggatcgcgacttgctgtggttgaggttggggttgtggtttggtggttttgtggtttttggtggtgaacattttggtggggacctcactgaggtgatgagattgacatgaagatgctcatgtaacggatgatgtaaacaggaatgatgagctccgatactaccgtttgaatgtcacttcactgtgtcgagaaggcaagttcggatgaagttctatagatagacagacgagtggatctcgaattgaagactgccggacttataagacttcgctgtcatgaaagtgagacaagggtacatgtgaaagtgctctcgttactaagagtaatcgttgcagtacaagctggaagatgtcgtgattgacccgcgagcgtggtttcaccgcttggtcgaccactgcaaggccatgtcaatatcaaagagtttttttgaggttgggttggcccctgggttctatgggtctgcagaccattctggcggcctatgttgcaaccggaaagctgttgcaaaactatgtccactgtggtctgcggcctgatagggccctcagttggtcgtcgctgtttgggccgcaaaagctctggcagatacggcacagtgccaccacactcgaagtttgggtcatctacctgtccaaatcttgtaaagaagtgggaaaacatctaatgtcggtgtcttgcggtattgaagagaggccaatgttgtctcttcccgttatcagtgggaggcagtaccgctgtatgggctatcactagctggtacagatagtggaggtgtagaaattccaggttggtgtcagcatcgtctttatgattggctccttccgtgccgaaaacaggcatccatgatccagtgacaccttgagcctcagacactaatgaggggaagggtgccttcctcctcaacatcgaatttgcgttgaattggatgccagccatggaccccgcgacggcgattggagttgtttcctgcattctgtcttttgttacttttgcatccaagatcgtaaagggcggcgtggagatctaccgacaaagaagtttaaccgagcatgcagaacttgaagatgtcatggacaagatgcacctcttccacgccaacttacaacagaccacttcgatgcaacagaacatgttagatgaagaaagaaatctttgtacccttgctgaggaatgccgcaaaatatcttcagaacttatccgtctgctacgctccacgaaacactcagattcgaaggggttgagggccaaatggaaggctttggctgcatggtggaacagcattgtttccgcaaagaaaaagcagaattggaggccagactgagcagctgccagactcacttgatcacagttctcacttggtcttcaaggttcgtttgtccgcggttaatacactcaggtacccgatatgactaactgcaagcaagattaatgcttgagaatgtggttgaagtcacagaaaaaagtaatgtcacccttgaacaacttcgaggctacctcgaggttttgaaatccgagctcgaaatgcgcaagatagcgcccgattgacttgatgaatcggttcaaaggataaccaacaacttcatcagtatccaagatgagaagctacgcggctatattcatgtcaggattgtagaggcattccattatgataagatgacaagtcgccgcgacggggtgcaagttctggtcaacgatatccagaattagctgaagaaggagggaggaacattccggtggcttctcgagtccgagctcacagtgcccgctggccacatccgcgacgaagagctgacaatgacgaaaaacgcgcggagaaagcttcacaaatggttgcaaacaggcgaggatatattccatatcgcgggcaagctgggctgtggtaaatcaaccctcatgcaactacttcgtcagcatcaatttgttccaaaggagctggaaaggtgggccggtaagcacgtggattcctttatttccgtttaacgtatttgataagcgagcggatcggacaagcgagtggatcgaattctactaccctattacaactatcctcaattgcaaaacaacaatactactaacctactacaattacatcagaaacagctaaatcagactcttctgcaacctcctggcacgtacggatattatggccaggcttgccgcactgtcacggacctgacataagtggggagcgcggggcgcgacccgtccaaccactaggaacggaaaagtgggggagtcagattatcactagcgccaagggtgataatcacgattatcaccagccttcggtgaacgacgagtgataatcgacattatcactggtgataatggtgataaacaagtctatatatacggaggaactggctggtgtagatagacagttcnnnnnnnnnnnnnnnnnnnnnnnnnnnnnnnnnnnnnnnnnnnnnnnnnnnnnnnnnnnnnnnnnnnnnnnnnnnnnnnnnnnnnnnnnnnnnnnnnnnnnnnnnnnnnnnnnnnnnnnnnnnnnnnnnnnnnnnnnnnnnnnnnnnnnnacagatgtctcatgtaaacacagatgccgtgaatacaattgtgaattgcatactgcggaactgtctatctacaccagccagttcctccgtatatatagacttgtttatcaccattatcaccagtgataatgtcgattatcactcgtcgttcaccgaaggctggtgataatcgtgattatcacccttggcgctagtgataatctgactcccccacttttccgttcctagtggttggacgggtcgcgccccgcgctccccacttatgtcaggtccgtgacaagggtagtataaggcacagaatagagcctcgctgtagctttgaggcttagcttagggttatttttaagggcttcaagtgcaagaacaacttttgcctcaactagaatcgaagacatcttagtatggtaggaggaaattgatgttgcaggtagagagctgtattgcgtgcgaaatcgatccactcgcttatccgatccgctcgcttatcaaatacgttactctcaatactcatgaggggttgtgctgataattgccatcaacaccaggcaatcgaacgttggttaaagcgagccacttcttttctgtggtggtgggtggacctcagcaatcgctttccggtcttttaggactttattgcatgaaataatcgccgcctcaccggcactcgctccgttattgttggcggaagcctgggagaaagctctgaacctaccatggcaagccgagagcgtgcgtcttacgatcagcaactcgatagttgaggcagcacttcaagaagtaatctgcggcgagaagtactccaaccactgcttctgcatcttcgttgatgctttgaacgaataccaggattccgagaagcatgatcaagcggacctcgtggatatacttcatgaatgggcgccatcaacacgacgcaacatcaaatatgcgttgctagtcgacccgaacctgtatttcagaacaagttctcggttgaaagtacattatacctccatgaccttacactgtacgatgtgcaacgctatgttgctagcggattgtcaaagctcgatgaagttgttcggaaccaactgtcaaaagatattccaggaaaggcacaagggatctttttgtggacacatcaggttgttcgagaaattagggaagactgggaggtcacacacgacgtcgatgtcaaattctagacagattcccggcaggtctacgccctctactggaccgcactgtagcgaccatccctgaacggtatcgccaacgggcctatctaacattcctgatgcttatcctcatgatggacctcgaaatgacgtttacgtctcttcaatattcgttcctggatgattattgtcgggacccgtcatttgcctacaccatggctgttacagactggcgcgaaatcgagacggaagacgggagactccagtcgataatccgagagagaatggaacgagcggctgcgcagctatatggttggcgcaaaggactggtacaaatgtcatcttttcacgatagctttggcgagcgccaatttggagttatattaatcagctggttgaggtttactcaccgatccatcttggattacttcaacgagcccttgataaaccagcggttgttcagtgttgtgggaaggtctcagctaattgaagccagctccgagactcttctgaccgaattcactgtcaatggcagtgtccatcgatcgataccagattactcgagttcccaatggtttgcgccctgaatcaaactacgcactgagcctgagatggacaaagccccgtacaggttcttgaagcatttccagaccgtcttcgagcttactctgttgagaattctgactatactggcagccgacaaccaaaaatggatctccacaaatgtcttcgtgggttatgaactcattggacgtctgaatagctcccgtggtctgcttgcggatgtacgtattgatttgagcggtagcccgcttctgcaactggcgtgtgcccgagtcctgcactggctgatctagtattgaatgatgttgaccacagtttcggatccaaactcgatgcagaactgattgccataacaatgatgtgggcattaatctgtggaatatggtctggcagccagttcgttccaggcacagtcgaaacttttgcgacaatcttgaaagccaaatgggaatacattgacacaaagacccagtttcggccggctacgatgtacggtgacttttggtcacgggacaagacaaccgtttggcaacaatatttattctctgagctgcatgccattaaagtgctaggcgttccaacctggtctgaaaaacacagcatggagttcgggcaaatcttgcaggcatatctgttggcaggcgccccttctctgtgctggataacttctcttgatgagacgccagagtaccccaccgatcgtgttgtgcagctagagatgatatctaatcagaaggagactgcgtgtgtacacgctgttgttgggggtcgcccgggttatctcccagttaacacaggagcaaaatggtctttgcgggaatggatcgactgcagcgatgcgcccaacaagagcacgttgctgaagctcatcgatgaaagggcacccagtgagcacaccaaccagtcgctctcgaaaagaaatcctgctagagcgtggggaccggtatccccggagacagaaaggtcaggagcggggaagatgaccgcgtccctggcagtgctttttatgggtaagccgcctccatcttgttcccgttgagccacatatggcacctgggatactttttaccgacttttaaagcagggactctggtggttggcgttgtttttggattccttgtgctatagagccccatcatacacagaaaaatgagttggatcttcggaaagccttgtccactcttaaaagaacctttcaatcaccccgcagccaccttctcgccaaacctgttgcttctgccgcagaggcacaggtgaacttggtgtagggggatgagagcattgggcatagaagcccaaagatgtcaactacgggacatattgaaacttttaatctggagacaccaagggtctaattaaggaggggaggaagaaatggatgggaggacaacagcggaatgctgcagcggagcgaaactcaaatagccagaggggagatgcgctagtataatttcactatctataggtatgtaacttcaagacatcttcttcaagattggttgccatgacaacgtggaccccagcccaaatagcccctgaacccctgaaagcaaaagtggagacctggggacaaagtcttcagcgcggttgccttcgaggtatatacataagaagcttgtgtggggcacctgacaaagggcccgggtttcaccagacccacacctctttgctcttaaggtggattttcctatttgtttacttttgaactgaacaactaacagcttacggtaataactattctgtcaaccaatttctggccttttggcccttatcttcgcaggcagtgactatccttggccaccgccccacagcttgtcataggacttatgcgctgtaagagttgttggccttggatattgtatacgaggttgctccgggaataagtcgatgcagcgggctgcatggaactttgtgtaacggccgcccggagatcgactgttgtgagctatgacgtcgagtagctgtattcaactgaaggtatctaagctcatcatcactgttgactgtttgaaaattgaatcaagatgtattgtgcggattgagatagttttattgctacgttttattttgtttttatagtttagcgatggagaaagatgagcttatctctttgataatatcaatcattcattcctcttctgccttggtatatctcaagcattcgagactcatgtgcgcgcatctttgctgcggttaggcacgacgaccaagtgccaagatgtgaagatcgtattctagttaaagatgaacctcgtgatatttcgaatgatgatgcccgggctttgttggccggatagtgcgtgtaatcaaccgatgttacgctgcagctgcgttcgtttgtagctccactcaacgcacgccaatctaggcacttgacacgagatcaaatgataggaaaaatatgggaagctcggcggtgttactcagcatgttcatcgatatacgagatcctgcggagttgagagtcacattccactttactccttctgtactgttgtcagacgtactgatcatgttacacccactaaactctacggccgctcatccgcgagagaccgaaacaagctttcactttacgaacttcaagttccacgacagttcggtcacctcacaattttccgtattcgggagcaccgcgtggctgatcgtgttgctgaatttgcttgctggaagtccctggatttgacgctgcacagcaagagaccctgtattcggggcttagctgacatcatgaagcgcgtagactatgggggcccgccgaatataaaaacgtcatcacagccattctgactcgtaattaactccgcaccacaacgctcttgagcatcttacatcaacaacagctaccagctacctacatacctacctattccaacaaatctttatcatggctcctatctctcttctcatcatggcgctcatgcctctgctcgcccttgccatgcccacagctatccccgcgacagcgtccgcagtcgacgtacccggcaacgttttagtctgtactggcgaaaattatatgggagaatgccaaaccgttcagtttaatatcgaatatcctggcgaatgcctgcctattccggagccgttcaagaacaatgtggggtcattcaagccagaccgtggtgccatctgccgtcttttcgccgccgatcggccagattgcaccggctccggtctctcgatcttgtattaccctggtcaggcggatcttctgacggacaatggagaatatattgccgggcatgaggcgacctattggaggtgccagacgtgcactggctgcacctaagcgtagagtgtgatgagttggtaggtaagttaccagactcggttcaactttcaggcaaggtaaagagctaaccacctggaagctagaagtatgtggagtgagtcacgacagtgatacttcagctcggaaactattgttatgggatatggggatatgcatgtatgtgagatgacgatgaggcttatgaaggcttaatatagatttaatgtaataatgctcatttacaacagagattctctgttctttggtcttccacgtgaagatccgttgtctcataccgacccttcaaaagccttgacacacaataccgccgccacagcagcaacactccccagcaaagccatttgcacaccctcccacacagctcttctcaacccttctcttgccaacgtcttcctcatcaacgcccttgtcattccttgtcagaataaagtccttcccaaagcccaagagaaacaaagcgaccacacaaaccccaaagctccacgcaaatcccacatgtatattctccataccgaaaaagaagtacggaaacaggagcagtatccccccaagtaaataaccaaaagacacagccaaccctgtcacaatggggctctccttcacctcctcagcggccttctcctcggagtcttgacaccggcgacgagaaggaagcaacccatcgctgcttgatacctcctctttctctccctcttccgcctcctccgctaatggtgacgaagacctgacagaggtagaaaaagggcgagcagctagatagccgctaattcccatgctgatgctacctgcacagatctccgccatcccggcgtagattactgtgcgggtattcccagtgaggataggcctgctgtgagggcaaagggaacggtgaggccatctgcgaagccgagggtgaagtttgagaggaaggaagcgagtgttatggtgggcatggtaaaggttgagggggaggtgatgagctcggggaggtcggtttctgtgattgggaagaggaagagtctgaaaaccgctccgtggagagggatcttttgcggaaagaggaggagatggggattgattcgtagattgggaggttgttctcagagctggacggagagtcacctctgatgatgcggctgagcttttgggacaaggatacttgtggttgtgacatgttgttggggaggaaagttttatatcagtgtggaagagtgaaattcgggaagtatcaagggacggctgatgaggtcaggaatgagggaagcccgtcatctttctaatctcttgtccagagcacatctgtagcttgaagcatttcctgtccatcagaagactctgacaccaagccatgacatccaaccactaccatctcatccgcggctgtcctgcaaaggcattgaaaatgcatgtaatgccatcggttcagccatcccccacgtccatgtgcagcaagacaatattactagcgccacgggccgctgcaacttcaagccatcaagtccagtgtcaagacagcagctacacacgtgtagagtgctattgttggtacactaggaaatcgtatcttgggattcagtgaggatatcggacatttacaatacacacgtgggccggattctctatgatgcgttcctagtctatgcccgaagcaatgaccgagagacaggcttgaggggaataaaagcttgttcaggcgttgtaaaatgttcttatgtgtggggtaggctggtagtaagagtgtgattgatatcagttggttgatcttgatttgttgggctagtggcctaggaaagtcactggccgcgaaaagagaggccaaaaggccagaaattggttgaccaaataggtattacaatattggttgttggttgttcagtctaaaagtaaacaagcaggaaatccggccctaaaagcaacccaggtgtgggtctggtgaaagacaggccctttgtcaggtgccccacatgagagttatggcgcgatgagagaggcgcatcgtacatacaacattgagtgctatcaacaccgcatagaacgttcttgcgaatgtgtagatagttgcattcagactaggccagaggccttcaaagatggcgtcgaagtagaagacctcctcacacgtgcgtcgaagttgggaatgtcatttgtcgtccgtgctggaatcgagcacggaatactgcaactgggaatatcaggatcacatttcaactcgatttaaaattagtttacagtttctgaaatatcgggagacggttactataaaagctctaaactatatccatttaatccgtttgcttcatctactatactcccagtgtcccattgtatattcgtattctcaatggcttcgtacttacccaatttcttagcattagccgctaccattacgggcctaattactgcagtaaaatcattgttgtgaccttccggtaggagggtttagttgggaggcttccggagaggctcctggggatgctcggtgaggagggtcccggaggaggctttggggaagctcttccggaggctcacctggaggctccaagcgtggctcatggcgcagacaccggaggcacacgggagtgagactcttggagagagtttctggcaacggaggatgcggagtgactcgaaatgaccggttttcttatgggaaaagcagcttcgaagggtcacgcaacatgctccggtgccgtggaaataaggaaatgaaggaaagaaatgacactgaaatgaacaggcaagccgaaagaatgatatgacttgtgttcaatgattaaagatagatggggagctctggtgagagcgtcccaaggcaaggccttttaaactacggaatcgagggtctcgggacccagtgtgatcatccacctgtggctcggagggtcacaacagttatgcttcttcttatcatatgaggcagctcccgtgatgactttaccgtggtagctaagcccgcgagagcggcagctgacgcccaagaactgggtaaagtatgaagctatagagatactggtaccggtagttgaatgagagtagagtggataagcaaagcgggaatgaatgtgtcacagtgccaaccaaggactaggtaaggtttcttgttattgcacgaaggagagagagagaggagcgatgctctctccgaactagagacctgctctactgtatgactaagccgctatccctcaaggttggtctggtgcggtgacagaatggaggtaactacgggcgtttggtacttaccgacccttacgtagtgttaaatgctataaaccgatttaaaatcaacctaaataggcagcgagtcaagtgctgattattttcgagatcaactgtaactacaaaacctagtgttgtgtgggtagccacaactggctccgtaaggagcttgggccaacctgggctggtttgattgggtctgcaagatttctcggtttgcctttccatagttaatatcaatcaacacttttataccaacacctagtaaagtgaggaggggttacacgctgcacagtgttgaccacagcctcacactaagtgtgtgcattgtgtgggtcacgctttcaccagtcacttatttatactcctacctggtttcttccttctcttctataccttagaatcaacgatagtaaagtaatctgccattagtggtcctgccttttcgtgacaggagagagtggggcgccgcccgttacccggacagggcacccacttgctgggcacgggttcttcctccagcaccttgtcgaagtcgtcgtccctggaacccatcgagcgcacgagagcagcttgcgccttgggtatttctcttcagcttcaccattcttcatgacagttgacgtagcttcgagcggagcgatggcaccgtctgcagggctggctgtgctgggctctgcttcttcctcatcactctccctggcatatcaagtttggccaaccgcttaatttaggtcaccttggtggccatcttcgcgtttcgtataccgctgctcatgttgacgacggagctcttcttcgtccccccgttgcaacctccactgccatctgactgaatcacgctcacgtccactttgctctgccagctgctgccgcgccgcttctcgtatggcctgactcgcattatttgctggctccgtcccattttgtctccgacgctcttcccgcgtatggagccttagttccgcccagatctggattatctggtcgccatcttggagacgtcattcctgctcctgccgtctcctttcttcccgctcttcctgagcttcaagatgtgaatatgcccagtcctggagcacctcctcctcctgtcgaagtcactctcgctcttcgcgctgttgagactctaacgtctctctctctcttgacggccgcgttccgcctgctgctgaagctgtatttgcggctaaactgatgaagagctagtatgtaattcagccatgctgaatatccgatgcctccgctgccgaataagcgagcgcaaggaaccgtaggcgcggatctcattgtcacttaccgtagtttccgagtgttgtgcggctacacgctacagggacatgatctgatgcacactgtcaattgggcccactgttaaggaattaatatcttggcagtgggacctgagccactgggttcgacaacaccagaattgacaaccccccatatacgatttgacaaacaccagcgggaacgccgccaatcacgatgcttcgaattatgcgcggtagcggccagccctccaggcgccaacacaaacaaaatgcgcagcgtgcggggcgagtgacccatgcaaacgcaacaccttgacaacagcgactacaataaccagctagcttcaacctcctcaatcagaccgaccgggattcacgctacgaactcgacagctacttacggtagatagttctcgcctgtctagcagctaccccatttcacctgctgatatactgtgcctccagtcccgcgaacattagctgtccgctcgtgcgactggttgccacaccgccgaacatttaattcgtatgaatcgctgccgagagagctgaacctggctgcctgtgtaatgcggctccttgaacgtgacgataccggcgacttccacctgaaggatctgcccagcaacgcgattccgccttacgcgatactctcacacacatggggcgacgaagaggtcctcttcaaagatctggtggatggtacgggcaggaaaaatgcaggctatgctaaggttcagttttgcggagatcaagcctggcgcgatgggctgaaacacttctggatcgacacatgctgcatcgacaagtcagacgctgtcgagctccagcacgctctcaactccatgttccagtggtatcgtaacgccaccaaatgctatgtctatctcacagacgtctcaacccgcaagtgggacgccgacggcaactctggttgggaactggcttttcggacatgcagatggtttacccgaggatggactctgcaggagcttattgctccaacgatcgttgaattcttttctaaggagtgcgagcgtttgggggataaaaagtccttggaacgagaaatccacgatataaccggaattcctctaaaagctcttcagggaagacctctatccgatttcagtattgccgaacgaatggcgtggatagagaagcgcgatacaaaatttgaggaagataaggcttactcgctattcggtatctttgacgtgcacataccggttatttacggcgaaggaaaacagaaggcattgaagcggctgcgagacaagatccgcgaggattatctctgtttagcaaagctgtggtccgctgacccgcgagacccgcaccacgagaaggagcgcatcgagctagcaaagggtggtctgctggctgatgcttaccgctgggtctttgacaaccccgaatttcggcaatggcgccataactcagagaatcgacttctctggatcaagggcgaccctggcaaaggcaagaccatgttgctctgcggcatcatcgacgagctagagcaacccatcactgctagtggtggcaacttggcgtatttcttttgccaagctaccgactcgcgcatcaatagcgcaattgccgtgctacgggggttgatttacctccttgctcgccgacaaccgggtctcctcttatatctgcccgagaatacgtacgcttccgacgacgcaatggcatgggtcgttctatcgaaggttttacggcgtatgctagaagatccagacttgaaggaaacctacctggtcattgatgcccttgacgaatgcgttatcgacctacccaaacttttggatttcgtcgtcatttcaccaggacgcgtcaagtggctcttatcaagtcggaacgaggttcttattgaggagaagctgaaacctgatgttgggcggacgagacttagtctcgagttgaaagcgaatgcgatgcaagtgtctcacgccatcgatgcgtatatcgacggcaagctatcaggtctcgcatcacttcaagacgacacgtcgttgaaaaatcaagtgcgggatattttgcaccaaaaggcaaacggcacgttcctctgggttgctctcgttatacaagagctcagtgaggatgatgttgagagctggcatgctcttcaaatcgtcgaagaagtgccgtcgggcctagatagaatgtacgatcgcatgttgaatgaaatcagtcggtacaaaagggactcggaattttgccggcgcatactcttggtggccacggttgcataccgcccactctacttggacgaaataggcagcttatctgaattaccggagcagattgtgggatcaacagagaatattaggaaagtcgtggctaagtgcggatcgtttctcaccatccgagaagacaagatctaccttatccatcagtcagccaaggactacttaagcgcatccgccttgatcttcccccatggcgcaccaattgcccaccgggatatatgcgctcgatcgctagagcttatgttacagaagttaagacgcgacatgtacggcttagttaccccgggatttcctatcgaccaggcccgcacgccagaaccggaccctcttgtgacaatacggtattcgtgcgtcttctgggttgaccacctccgcgattcgattactgataaagacacgccacaacgcaacacactggatgcggtccagacgttccttgaactgaagtatctttactggctcgaagctcttagtctactccgagctatatcggagggtgtcattgccataagaaagcttgagggcctactagtaagtatagcttactaagacgagacagccatactaacagagatacaggggcgaactcatcaaaggcagctaacaacttttatccgggatgcgcaccggttcgctctctccaacagatggataatcgagcaagcccctcttcaggcgtatacatcagccctcgtatttgcaccggttggcagtctggtaaagaagagatttaagacggaagaacctagctggatcagtacaaagccagtagtagaaacggactggaatgcatgccttcagacgctcgaaggccataatggctcggtttactcggtcgccttttcggcggatggccagcggctcgcatccggtgcaggcgaccgtaccgtcaagatctgggatcccgcctcgggacaatgcttccagacgctcgaaggccataatggctcggtgtactcggtcgccttttcgccggatggccagcggctcgcatctggtgcagtcgacgataccgtcaaaatctgggatcccgcctcgggacaatgcctccagacgctcgaaggccataatggctcggtttactcggtcgccttttcggcggatggccagcggctcgcatctggtgcagtcgactgtaccgtcaaaatctgggatcccgcctcgggacaatgcctccagacgctcgaaggctataggagttcggtttcctcggtcgcctttttggcagataatcagggggcgcatgggtatgggttgggccaagacacgacctgggtcatttgtaacggccagaatgtgctatggttaccacctgaataccgcccaacctgctctgcaatccaggggcggatagtagctattggctgttcatcagggcgagtttttactattggcttctcaagagacaaataatacatttccaagtcctctccattcgttctttttatttcttttttctagcctaacacgagaagggcctggaaggataggtcaatttatagatattttcggaattctagcatctcccatgatgctaatatcagttccttcaagaggcaaattgatggtaacattttagttctgctcagctctgctcggttctgcgacagcgtggaatcaggtatctcagtacgtaattgcttcgggaagagggcacctgtcctctataactcaccttttccacagtagattaaaatcgccactcgcacatatcgggattcctcagcgccctcccgaatcgagtcagacaattctgcaaagaattggcccagtggcgacgagctgtaacgccatttccatgatgccgcgaggttccacgagtcagccagttgctggcgcgaagctgtcctaacggagcgagttgcggctgttacacgtctacgattagcaacgcagcgaactgcaagtcctgagccagtcgtcggaaagtgaagcgagcaaacaagccacaggcgtcatagacagatgtgttaatggcttatgcctgaggccatgacaatcacggaccgctagtgagagataaatatgcgatcagagcagtggaacgaaatgattcctcattaagcattttaaggccactgatgattattaaaatgaattgaacccatgttgttccaagccctgaactccagccgttatcacagcggtctattaatatttaaaagcttttagtagacaaggctcgtcctccaaactttccacaactcgacttcttggataggatagacctggtcatgaacgaattatctcggcattcggttataaagagctagccgagttgtttcgttttgatgaaaacatttggcgaactagaatgttactctgccttcgataaacagccctgttgattagccttgcgtattacggctttctaggtttacgccagccgtattttcttaagtgcctaaccgtaagtttttgcagcagggaaaacgaccgcaataggtgatctaacttgatttgacgttcgtgtaatgtatccatgcgcttagactctaaaaatctcttgaattggtcgaaggccttattcgcactcggtccggatggaggttgaactgcaaatcccatgtctaccatataataaggggtcaaacccccagtcggtcctggacagcttgcaagaagaagagcgctaggcagtgggcacaggtccacgcccctccccccccccccacccccaaaaaaaaaaaaagaaagacttgccacgctggtaaaacctcctaaaaatgaagctatctacaaccttgccgccgtcaaatcatggagccttcactaccctataaatcctccctgatttggtcaagccactcggtactgcactctcgccgttccctggtccctttgtgattctcgtatcctggctgccgggtgcccttcggggcccctttgtatcgtgatgtctccctcctctggttcctctcgaaaaggtatgcttccactgcatccttattgcattcctaataacactccgaagatgtattcgatctagaacttcttctcctctaaaagaaagaataattttgacaagctgtattctccgttgtttgctgaaaattggacaccggttgcctcatgcctcagccacctttcatgacagttttcacacatcccatgaccttcgattggcgttgttagttatgtaggtacgttgacgaaatccagggtatctattcgaaagccaattgctacattttgacgtaagcatctctgtccctgttatacttctatcgaaatagacgtggcaatcggtgctatagaggcgcacctattctcccttatgtattgttttctaacgatatatgtgagaaagaagatagtaggtataacaaaaaatgtagccgcaggacatgcacgctagtatcgtgccgaagttactactctattggataacggtggaacaggtatgataattgtaaatagtatcgttgttgtgaccttccggtaggagggtcctgatgggaggctcccagggagactccccttagaggctcgatgaggcccgatgacagttcccagaggaatgtcccgttgagagggcctcggcgagctccgagtcgtggcttccggcgacgatgctggaagctcaagggtgaggactctaactgagagtcctcattgaataggaaatgaagaaaagaaagagatgaaaacccaacacaaagcatatgatctgtgtgctatggtaaagagtgctggggagctctcaaaggagcgtcccagaccgaggctttttatatgtgagctacggagggtcctagacccgcatgtactcctccacctgtggctcggaggctcagaacaggcttcatacttccttcctagtttagataactatctagtgaagtaaagtctgggaacccactttactatgtgctttaggaatatagttaaaccattatcgaaatcttatctatatttacggtgacctcttccagagctggtcgaaaattgtagtagcatttcggacatcattacacctctgagaacagaagctcttaccaaacaccaaaataattaacctccccttcaccgtcgctgcttttagcctcctaggtagtgctgctacttaaatacagtacactagtatatatattaccgtgatagctactacgcgcactacggctttaaccctctccctaactagcaacgttaccggaagaatatttgatcgattcgtctaaatctggctcgagaatgtcgattatatcgacgcgatcgctaaccgcaagtactcctttaccaacctctccgcttatccagtcactaacctccctccccccagctaaccacgtttacctcgctacccaaagtatatctctaataaactacatcgcccgcgcccacccctctcaacccgactatatcgccgtcgcagccggcacccgccacagcatctccgacaacaacgtccaccgccttgacgcctccatcaagtctgttgttgacttcctcgaacccggcggcatctcctggtccatctaccaggaagacatgccttgtatgttcaattcctccctttccgccttgaactggtactaacacctccccccggactccggcttccaaggcccctcctacgcctcgggctcctacgtccgcaaacagaaaccccctcgccagtttcgactccgccaccggctccatctcccgctcagccaagtgcaaaaacttcacaatgttcgaaaaagatctcgcatccaacaaggtcccccagtggatgttcctcacgcccaacatggacaactctggccatgacacctctgttgcctacgccgggagatgggcacggaatttcatcacccctttgctggctgatagcaagtttaacatcccgcggacgttggtcatgttgacttttgatgaggggtcgtacagcagaaataaccaggtttatgctgtcttgttggggagtgctgtcccgacgaacaagagggggaccacgaatgggacggcgtatggacattataatgtgctgaagacggtggaggtgaatcgggggttggggaacttggggcagaaagatgtgggtgcgaatgcctttttctaagaggatgatgcccctgagcccccgagatgggggtccacttgttgttgcttggcagggttggggttagaaggaggggtgggaggaggtacgatggttatgcattccaactagtctaggtacactttacaacttctggtcattggcaggcagtgttcttgaaatgtgatgatgaagttcggtgaaaggcaatagatattatcaatgccaaacgctattagatctgttttcccgagatggaaacataaagttgacagccagagctgcctgatattcaagcaagaagtccaagtaatacacatcaaatcccagctatcataaagccaaccaagcccaacacgccggcagcggcgccgacacccccatgaacagccgcagcaccggcagtgacaacaggaccagtgcttgtgatgacaggagcgccagttccagaagcgacaccgctggtcgtgacggtagcgatagtggtgggagcaggtccatcgcagtgccagtggtcgccatgaggttcgcacccgatggaagcggttgggctggggggcaggacaccggcgctgtggtcgtcatggtcgtggtcctcttcgtcctcatgatcatgatcctcgtcatcatgatcatggtcctgttcgtggtcatggtcgtcatcatgggcggcagccgtggtggtggcaggaacagtaacgacctcggaagcggtgatgatcaccggagtcgcagtggttgcgggggcggtctcgcggggtccatcgcaatgcctttgggaaggtaaagtcaatgactattcagatgtttttacgaaacgggaaaattctcaccagtgatcaccatgaggctcacacccgacagactcggtaggcgaaggtgccaactcctgggctgccgcaaaggtgctgagggcgaggatgatggcggcagagagtgtcttcatattgccgtgaataagcgaaagacaccgggtggaatatagagaacaaatatgcgacgatcaaactgagctagtgaggcaagcaagacatgtaaaacatgggatgaaaggctttttatagatgatgagcaggacccttcatgtgcccaatgtcaatagtagttccaggcttcctgtacctgcatctgaagcaggctacatccttggtaaagtcgacttcctctcctgtcatccgaggatgtttgcatgggtaatcttgtttttgtctgcacctcgatgattttcgtgggggtgagctgaaagtttcttgcaggaaaccaacatgctaggtgtgatggagaccatcaaggttctcagccaagacatgtctcgcttccacacgtgggatcccttgccaccattttctggttggggccaacgccgcggtgtactcaagtgaatagaagcttctttttatttcagcagggctgacattgaagtgttgaatttgcacagattgctgaaaactatgtacatgaacatgtgtccaaccctccggaacttttgacgtttttcatgcagtatccacagttctattttcatccttcgtccttcaccaagtccttcctgcagccatacttcccaggtagcagagctcggtcgatttttgatcgttgataggggtgtgaagacggcgggctggcggccagcttaggcggggataacgccgagagcaactggtctaatggtcatcacagtgatatctcttctggccagcgacagggcaagttgtggtgccatgggtctgatggcaagcacctccgggattggtggcacagcagtactcgcaggctccaacaagcgtgcacccggtaggggggaagcaatcgcgagcaagaaggtcgctcttgaattcgggagcggcataggccacagacgcgagatgaaaggccgcaatgaggagcttgaaagagaccatcttgacagtggttgttggcggaaggcttttgatgaggtagtagagggcttggagagggttgatcaagagactcgagtgcgaggtggttgatgatggcattctctggatgaacgcacgacatctcgtcctctttatacttgaactgtcctacctgatccggactttacctctactcacttcgcgtagtcctccagttctttcgatatgcattgcaactctgtccacatgaagtgcctgccgccgcgtgagagtcgactgctccgaagctctaaagtgcctactagagcatctctgttctctaccatctatgagtgtagacaccgagacggcttcaccagcggtccgagtcgttggagggcagccatgtaccttgatgaacagagggtcttgacgtggaggttttatctgtggttggctgcgtatccactccttgagcaccttgatgggtacatcagctaggatgcttggcatgtggcagccatggaatattgaacctattgtggcttgcctctgtccatagaggttcatgagcatggtgtggtgcgttccatcacgtaaagaacccgcgcgggatgacggagatcatccaaaagcttgttggagtcgattgatattggtaaccgagggtgatattgaggccacagaagtgggatgtaactgcaaggtcccaattttggatagagagtcgtatttgcaggaagatagctggcggccatggcggaaggttggctgagaagaaggaaattagtagatcaagtcaagatggtcatgccgcgaacggctctcgtcgattagtattaaagacaagaagcgtctcaagaattgatgaatctcggtgtctaacacccttcctttatgagacagactggtgatcaaaatgatgaaatcactcttcgctcttggattcgttgtcgagttggtggcggccttgccccaggctgtcaccccagcccctactggccaagcatgctcgtaagtgccatccttccgctttcgagattccagaaaaccaacacgacgttcaggacgagaacccgtacccagcttggaattgacgcgaccatcaccaattaccccgaattcgtctcgtcaatggaccagtattggtcgacctcgggagttccgttctcagggacagaacgtgtgattgtctacacgtctcttgaaacattcgacggtggcagcttcacaggctactacacgtacgacatcaatgccttgcgcaccgcgggatacaccatcacaaccagcacccaggtgtctgtatcatgctctcccacagcgaccagctcggcggttggcgaatgcgagccgcatggtgatcactggcactgtcccccaggagtatcagagccaattacgcctccttccccggagccccatactactcactcggctcctaactccggggagtgtgaggctcacgatgaccactggcactgccctccaggagttccagagcccactacccccccagctccatcatcaactcctgtccccaccacccctggctcggacgagtgcgaagcgcacggtgatcatttgcattgtcctgatggcgtgccagagccaacgacgcccccacccgtcataactcctacgccgacatcgttcagctcagtgacagcatcgacctcattcactcgcacagcatccgacgcgcctgtcgttacggctggtgcagacgccaaaaccagagtcgggagtcactttttagtattagctgcagggttaccgtttgtatttgggatgatgtgatagcctgggggaatctgcggaccatcgattgtatagttaatgctcaataaaggatgttgtgggagtgtgcgttgaggaccttgatgtcccacccctgaagcgatggcagccatcaaggttctcaatacctgatatcaaggtccttctgcaacgtcatccaatatgacatcccaattgacaacagaccatttgttctccttttgatgctttgttgctgtgaataaaaagccatccgagtcctttcatcctgacgaagcgattgagcatccagctgcctatcatctcacccgacaatactcctcacaatgcccgacacctctcgccaaaccttgccacacgtccatgatgtggtcatcattggtgccgggccttgtggtctagcagtagcagcacgactccgcgaaaaggctccaggtgctattttcacagacgaagagcacaggagacaccggtttttgcatcgctatggacaatccatgccactgaagcaagtgagaaacggtcgggtcacatgctgcggccgcccaacggcaagcgatacacacgatctcgatatcacggcgctcgatgccacccatgacgactggtgtggccgctggaacaagctgttcaagtgctacaacatcgaacatctccgaagtcccatgttctggcacgttagcccagttgaccgcgatgctctccttgggtacgcctattcgcagaaccgggagaatgagttgctcgagattcaccactgtgtcggaaaagaagtcagcaagcacatgcggaagaggacccggacgcagaagtgctcagcccacagtgcttgcaacgccagagttgagatcaacgaacgggaccgcatcgactacttcaacccttctcaggccctcttctctgatcattgccgtgcagtcgctagcaggtaccatctctgcgatgatgtcgtcaagaaagagtccgtccaagacatcagcttcgatgtggtccaaggcatctctgtcaacgacgaacccctcttcacagtcaccacagaccggggccctcagtatgcccgaaccgtcgtcctctctgtcggaccagcaaatcaaccttccatcccacgtcacgccttcaaagccttctcggcaacagaatccctccctcaagtctgccacagcacccaaatcgaaaccttccccgacactgtcgttcgcaccaggatgaccaacggccagagaaccaaggtcctcgttatcggcggcggtctcacctcagcccaactttctgacctcgccatccgcaaaggcgtcaccaaagtttggcacctgatgcgcagtccgattgccatcaagaccttcgacgtcgagctcagctggatgagcaaataccgcaacctcgaacaggcctacttttactctgccgacacggacgaggagagattgcagatggtgagagctgccaggggaggtgggagcattccaccgagataccacaaaaagttgaaggatcacatctctcgtggcaggctggagttgcggacggagacaaagttggtgaatgcgcagtttgtgaccactgaagcgggtggtcggtggaaggtcgaaactgagccggcggttgagggtataccgttattcgacttcatctattttgcgacgggaattgagacagacgttgctgcactaccgtatctgcagacgatgagggaaacgcaccccattgatgagatgggagggctgccgtgcttgactgagcaattgaagtggaaagatgacgtgccactttttgtgacaggaagactggcttcgctgaggttgggagctgctggtccaaatcttggtggggcgcggacgggtgctgagcggattgccttggccattcaggagcattttgaggagtgcaaacgcgaggataagatcagtggagacatcgctgccgccgataaggacgagaatgaatgggagcggtttgtgcttgggcacggaagcaagtattcatgtttggtcgagcactagagatgagcaagtaccccgaaatggaaagagtgaagcattcgccgtgtccgatttgagatgggagatgtgagatgtggtgaagaagtggacccggatgtcgtcaaatcaaggactggcgacgccggagcgggagccggcaagtggggctcttgcagacgcgatcggtcggtctttccgttgcatccgactgctggccgtccaagtctaacatcatagcttcgcttaagccaatcgcaataattgaatgaaacgatgttactccaattctaaaacatgcgatagagtctgttgggaatgttacagaaagcaaaaagaagccgaggttgaagccgttgttcctcaacgtttctttcgctgctaaatccacttgactgttggcttggcataaaagataaaacacagtggagatcaggggctccattgtagaccctgtaccctaacccttcgttctctcctttttctctcaaagtcatctccatgcgagcccgattgatgagagaatgtggcacagctgcatttgttattatagtcggtagctagagaaaagcagagcctcatcaggggtcctattagctcctgtaggaccatgcctggtccctgcgttggcacatgtcaaagatgattcggtgttgcattgtcaaaatcagggtcaaatctgacagggctgatccgcaaggatgcctcgatgctgcatggtccttgtcaacatgctgccaatgataagactccagacacgcgatgggacccgataatcaatgctgacctaccacatttgtgactgcctaacggctcgacaacgccatcttaagtcctatcagggcatttcctggacaaaagcatgggtcgtgtgtctatccctgaacaacacgttagcttaaggttgtgacacccgccaatctgatccagcctcgaacatatttaatgacagcgttatctctcgtcagacagagatgtttctagccttatccttgtttttctttttcacaactctgttatcctcggggtgaaatatcacgctcattttcaccttcactcccacatcgccaccccttcacacccaccatccagtcgttacctctccaactcccatccatcatgacagccacaacccccctaaaagtaataataatcggcggcggccccatcggcctcaccctcgcccaaatcctcacctccgccggtgtcgacttcaccatcctcgaacgccgctccaccgtcacccccgaagaaggcgccggcatcgccatcggacccacctcctttcgcctctacgaccagctcggcctccttccccaaatggaagccatctccacccccatcccccacaagcacgtcctccaacgcgacggcaaagtctacaactcgtacgaattccacctccgcgcctgccacggccgcgcaatggccttcctccaccgtctcgacctcgtcaccactttattcagcaccctcccggattccgccaaagccaaaatccacgtcaacaaatccctctccgacatcaccctcacccctgaaggcgtaaccgtcacctgcgccgatggcacttcctacaacggcacccttgtcatcggcgcagacggcgtccactccaaaacccgcaaaataatgaactccctctccaacgccccagagtccgaaaccctcccctttgaaacaaccttccaaggcctcttcggtaacttcccccggctatccctccccggctcggaaatcgagccaggccacgactgggagtgccattccggcggtgtgtcttcccagttcttcgtcgggagggacagaggctggtttatcatctaccgacctctccctggcggtcctacgagggaaagaatcgattacacggatgaggacatcaaacagttcgcggaagatgtcaaggacatgcatgtgacaaataaactgacttttggggatgttttcaaaaatgtcaacaaggctgggttgacacagcttcaggaaggtgctgtcaagaataggagttggaaacggattgggttggtgggtgatgcgtgcgataagatcacgccgaatgtggggttggggtacaataacggggtcttggacgtgattgtgcttgggaacttgctcaaaaagttgaatgagagtggggaggagatcaccgaggagaaggtgggaaaactgttcaaggagtatcaggctgagagaaaggagttttcagaaaaagtggatgatgcggccagaggggtcatcagaacggttacacatacggggttcatgaagtacttgcttgatcggtggattaacccggtcttggggttggacaagctgtatggtagcaaggtgatggggccgttgatggcgaagcagcaggtgttggagtggttggaggagaagaatgggattgatgggagcattccatgggcgcacaagggactggttgtcacgaaggcttagagtgactgccgtgttggcgttaattttctggtaaaggatggaatatggcttgattgtggatgggtaatggttgggcaggaaaacgggtgtaaattctgtaatttttcgtaatttttatagcttgaacgcgtttgttggcacattaagaaagtcattagcagggcgcatcattccttggaaaaggtccatttgtgtaagacaactagttcttgtggtgtaacgaaccaggcacattgcatcgctgcagtgtaaagctcgaccttccccgagggtagattaatagataattggttaggtacattggcgcgctagtgccatcatcggatgctgtggttgagtgaatggtacgaccagccattgacgaatcggaccttcagttacccctgagccccttaacccctgacgaacttcgttgacatcaacaaccctaaccctccttttccctcgctaaagcggccacaaggtgccgtccaaagattctgacgaacccaaccacatgaagtgagacatcatgcgtcaggtgattgcaaccccgccattgatgaggctctgctcgcgctcgttcccccatgggcaggtgggattggagcgatacaggaggaataacccccgtttcgcctgtcacccttcaggtgttcgcaatcctgcccgaggtccagcttatcttctgtgtcgcgatgccatgcattgtgatattgggaacttgatctgcacagttagttccggaccttgtcacgcgcatcaatttatcgaccgctttacatctggaccgtgacgctgcacgtgggtgaagcgtgaggatgggacctgcgcctcttgggttcccatggggcgttccatcttaagttcgatccagctggccgccgaaattgacgctggcgtacaattcatgcatgatcgtgtttctctggttgttccgtgaactggcaatggcttctcatcggttcaaaagcaacataaagtattttgctcaaaaatagcaaatcattaatgtggcgttcggcgttatccatttcagtgccacttgtccttcctgcactctaccccgtcatgtgtattagatgccaagcatactgataagtgtcaaatgcagtcccttacgccgacgtgtgaattgatgtcgtatttcatggcaacctgtgagacaacgtggggtaatacccgcgttcggtgaagagaagctggagttgcagtggtgcgcgaaccataaccacctgtgtgtcctttgtctgatggtgtcgagaagtacaatacatggctagacttgggcctcgtggacacttgttgttgctgcaatgctgcccaaccgcaaagattgaacttggtggtcgctacgacctcggtcaacacggcttcgttgacaagtttgctcagcgcaagccatggtcgctcatatcttgctggcgatatcgccgaggttcacgaatggtgagatagaaacctgcgagaggcaaggaagttcgtgatctcataaatcgtgctatcgtaacaatgggacatgatatcatcagctcatcaaacagagccgtcgtataaatgggaaacctgaagacccagcaagcaaagacctcaaagaataaagaaaaaaactccaagttgggcgtggaatgaatttcccccgtcgtctgtgtaagctgcatcattctgatacctcattgcaggccggaagccctgcaagccccaggtttactctccactcctcggactcatcagcgatgaccgccgtctccgtttctttggcctctctactcccaagggcagagattccattccatgcccgagattaatcacctcctcattgaatgcagttgcagagggaaagtcaacctctgcctgtgtgccttggaaatgagacttttggtgttgaacgagattgtctcgcctggtgtatgtggcggcacaatgatcgcaggggaacgtgtccacaattccctttccagttttcctgctgtgcttgatggtcttcttgtgcttctccaattttttacgctggtctgggccagcaatgggataaaagccgcatggttcgcagctaagcacaggtgactgaccatatacagtttcgacgggggatccgtcggtgctacggctctcctctgtcgaataacccccttctgcatcagtgaaaactgcaggaaatgagttcatagtgttggcctccccatgagttgtaggcgagttccatatgtgttcgccctggtccaagaaaggcatgggtcgcaagatgggtgattcttgccaaatgtcattgtttccgtatgcaccagaaaaggagcagtggaccatgagagcagactcggggccagtcacttgttgagagttgggtgacgaggcggcaaagtacgaagtcgattgtgatgtcggtactccagaagagaccatgtgtgaagaatcgagctcaatatactggtgaaaagctgaagaaaagtttccggcattgatggtttgcgatggttgtgatttgggccacgcgccgtctcctggagactcgcaggctccttgtatggtggaatgatgaagactatcacacatgggtgaccaggtagggacaatggccaatggagtgcagcttgatgtgggcgagatgtggctgttgctcgcaaaaggagagttgatgaacccagagctggtgcttggggacacgcttgaggtggctagaaattgtgggcgggcgtcaataacgcgactttgaggtccaaacctaagctctggcattttctcaagaggaggccgggaagccaaggtccgcctccgttcagcactcatctccactggactagcagtgtccatcatctccaccggtgacaccttctcagtgttcatgagctctggcggcgaggtgttgtgtttggtgggatgtgagtagatctccacaacgtgttgatcaggtgacgatggtaaaccctgcgagtgtgttttctgatgcccatcagacctcggtgaaacttgggcatctttccaattgttgatgggctgaccctcttcggagtccgtctccacagagctttgagaccgagatcggcttttctgagaggagctggaagaggacccaagaaacaagtctgctatggccttcttgaatgacctcctatgacgaaggaattgcagtcgttcctcaaacgcttttatctgctcttcctgtttcttcaggacactctgctgttgcttcacggtactctccaatacttgaatgcggcactcgaagtccacatccttctcttcgtttgaactgaaacttgtcagtcagctagacaacatctaagagatggcgtctgacgaacctataacctgcatggatatgttttgatgatgggcttcgtggtgacaggcttggtggcgacgaggtttggggtgagatgatgtcggaagatggtagctcagatatgccagtaatgacagagctgggagactccatgataactgagaatgcggaatgattgtgttaagttttggcgtagtgaggtgcttggtagagcgaacagatgatatcagaccgcagaatgtaaaggtgccaaaaacagggaagttcgccatttattaattgtctttcagcagcggctcttctttcagtccagaagacgacatggcccttcgtctttaattggcttcggaacttgcagcaagagtttggacgtcctggaggtaattccacgacagggttcctgcatgccgcatcgatggcctcagcaaggccagtagaagacggccaatttccatacttgataacgatagaccactagggaggcgagtatggcagaccattggaactagatcgggtgcgatatgcgtgccgtctgggtaactaaaccggggaccggatgggtaagggatcctgccgttggaaatccaaaagtggcaaatggatttgtacatggaagttccattcgaccccctgtaccaacttggacctgcaccgctgacttggcccgaggcaactgagattggttgccttcaaccacatgcaggaggcagaatccagagtaggggttttgccagtggcgtccggatatcaacactcagtcccttcgaagaattccggagcaagcatggcgctaacgtagcaagacctagaggcctacatcttgcaggtccgatatcgacatgtggatggaaaggagctgagagaaaaaagggcggcttgtaggtcttgaaggatcaaggtatctgacggagaaacatatgttaaggatagaatataaaagcgtctggggggttggggctccatactgacgttaatacgtggtttgttacccgtgcagagagactttgcggagggttgccatgtggaataggtgcagggggctgggcgaggctccaacacattcttgtgagacgtaatcccaatatcaaggcgggctgatggcagcatctgaagaccggacatgggaacatggcagagagccaggaagggatgcttccgaaagtgaagaggaaagatggctagatatagcaccttctttgcctcctcttcgatagccaagacatggccgccgaaatggccttcgtctgggatggaaaaagggcccccatacgccgcggcccccatattttgtgaggaaacttgaggcttgcaaggaaacagcagagacaacagcagtgagtatgtggctcagtggccttgtggttgctccggccgatatcagatcgacaccatggaattcaggcaggctgggcaagccgagcctggaggggatgctcgagagagcgtagttaccagcgaaagccattggataatagatagacaccgctcatttgggcgagccagatgttcagttgggctaggcaaggtcgacctcaaaagaagagagcatgtcaatgaagtgacaggatgccctaaagaacaactcaaagatggtttcccgatggcatccatcgacgttgatttaccccgctcaatgaagcttgagcaaatcacaatagacccggagagattgggccagttgattggcccatcttgaccggcaacagcaatgcactaagccagagcaggcaagaaaggaagattgcccttgcctcagcatcaggcgaggcaagtcacactttccaggcgataagcagaaagggaaagttctcgcccgcgagatgattcagtgtctgagacgccaatgatagaaaagcttatgtgtactaattccatacaaagctcgtgtctagatgacctgttgaagtggacggtgatatcgaggatatcactatcacccagttcaacatgatttcatgatagatcccttatataagctcgtgtggttgagtaatggacaccaggtgacagttagcgtctcacacgaagtacgagcagcctccgatactcggacgataacagcagaacgggggggcttcactttttcaattggggtgttgcaaggctacggtcagcggcacgtccatcgaccattgttcggcatgatgtggacgcgatactgaccagaaacctgggtgagatcgatgctagcccacagctgctgctggggtttgtattgtgaggcctgcttgtcagcttcttgttatcgctgggcagatacactgcggggtaaacatgagccgcactcaggtcgcgggcgagaaggaggccttgggagcctgcgcaagcacatcatacaaaaagactcggacttctgtctttttgacaatgcagacatagaatgttgtcaattgttaggcctggcccactgacatgcgtcaaaatcaatctcggctctccattattttgtatcaaacatgccaagacaactctccgcacagccttcgtccaggggttggggcgcagataatgcgcagctgcatgtcgatttgatccaattgtctttgcccatccactggcggccgccctggataatggaatttgccaatcagtgggcattcagttgagagttggaggggagcaagaggggccagcgcgcaggcagacgccccgatttctcacatcctcagtcagccagcctatgaaacgtcgtcctatccatgcaactacggcagctgtctgcaagtgttctcctgcagtagccagtccaaggcgtcccggccacctgtgcctcagatccctcccacttccatggtctcaatcctcccccagcttataagagctatcagcccggaaccccgccctcactttccccttgaacctttgcagcaagaccattgctctctggtcttcgtgttatacaactcacccccacctccacaaccacaatcatgtgtccggtaccctactctcctcaatccccattccttgagagaggaagaaactcagcgcctgtcaatgctgccgcatatggcgatgatgagtcgacagtatgcagcgacgactctagtgtcgtctcctccgtatacagtgacagatattggataagccaggaacattgccctctccagtaagtgtgcccagtctcgtttgccggagggcatgtgctaatatttgagcacctagtcaagtagagaagaacgaggcgggcaagcaggtatacgaggcttggaacatcacctatcttcccggccaacgggaggtattgggtggttttaaggcgctcggggtgggtgtgcatgaataccaacaaaccgaagccagggtgtcaacagttgctcaagcatccgaacagtccgtccttgccaacatgttctacgacgccgtcaaacagtatcaagacaagcatcgccgtggatgggctggccggatcctccgtgggaagcaaaagacatatgaagaacaccttgacacgatctgtggcagccttccaaacgaagtccaacacgccatcacagatttgcttcttgacagagggagagcgacatcgaccagttaccgcactcgaacctggacgcttgtaactctccgtgtacagagctttctgcgattctccggcgcggatcacgcggatgtcccacaacctcgtcgtcgattgtggaagaagaaagccgccattggaaaccaggccttgaggatctctcttgttattcgaggtggggagaccggggtcagcaagaccgctgatggcctcgagggatgccaccaagattccaacccctgggggcgtgctgacgaggccgaaacgagcgaaatggcccgtgagagacaccgtcaaagacgtctcagagtggaagcatcgcggcccaaacgcaccgaatcgccaccatcatatcgatcgacttctgtatcaccacacagagagcgacggagcttcgcatccccgccctcatacacaagtcgtccagatcgatctcgcggccgtagcctttcgtcagagcaggtcagacatcgcgtccaaaggcgtgaccgctcagaggacagcatatcagatagctggccatcgccgttcggccgcgatccgtatggagctccaacacccccggagacatatacaccgccgccggcaatctcagcatacagcagaccatctgtgatcccccctcctttgccaacacaattccctcttggtcctcccatgattcctcgttacctgccacctccgccaccccctccgccaatgtcaatgttgccgtgcaaagcatgccaaacccttacgccatgcatgcacttccccaactcccaccgataccaatgccatcggcaactgatcaacacagtgaacaacatccccacccatccgccttgcgtcttttgctttggtggcatgagcccgtcttttccccctcctccgcctccccctccgatgccatcttactaccccggcccaatgccaatgggcccgcctccccctccacctccgggtatgtggccaccaccgagacctatcgtaccacctagcggacttggcgagatgtgcggtacgtctgcgctcatggcaaccccaccaccacgtcaaagacaggacctggtgatgaggacatcagaattccctcgccccgattgtagaacagaaattgctcgcgatgctatgtccgactttgactttgactcgttcttgaatgacgactttgatcccccttcgctaccgccgctgccttcgtcttcatcatccttgtcatcattgtcgtctaggtcttcctctccggtacgtcggccatataggcccgccagagtacaggatgccgatgagattagtgttacttcgaccgaggtttcggatgaggatgcacgttcggctcgagatggtgatgatggtcaggttccacagctcaaggaagagaagacggtcttaaagcctgaggtatagcggttgcgcttctggggataggtggacatggtgaatcggtgcttcatgctacgataatgatgcgatgatatggctttgctctttcatatgtaccttgacggttttgttggtctattttagggtctgggctacaaagtagctgtcatcatggttggtcgtcatggttgacaggagggactgggaactggtgggatttgatggttccttcaggcgcatttcttgtctgtttgttgttgttttgtaaggaaagtatcctgatgccttaagtatcgaaagccacactgcgcataaaaaaaggtgaaaataatgaagagaaagtttcacgttcacatctcactttcacatcaaaaaggtgcctggtttaccggccattggcgttccaaaacgccccaccagtcgccccacagcacccgcaccacgatcatgtgcaaacgaaaactccgaaagtggcccgtgcaattaaccaacatcaccgcaataaagcacgtgatatcggcatttcacttgcaaccactgacgagacggacaactcaccgcccgatcaatccttggccagcatcgaagctggcaaaaaaaatcccaaagatttcgccgctgcttttcgaaatctcggcctttccccgtcaccaccaccaaaccacccaacagcaaccacaacaccacctcccccaccaccgaaccaaccaaaaaaatgcatctcatgtacatccccaccgccgacggcctcggccgccagtacaccctcaaaaaggtcctcgacagcaaagtcacccgctctgcccacccggcgcgcttctcccccgacgacaagtggtcccgccaccggctcgcgatgcgcaaaagatatgctgccttgttggatgccgccgagaagagtatgtcgcgttccgtcacgtttttgtcgaaaaagaagctaacctacgcgcacgtaacagagtaaaataaacatttacttcgcgatcgcatcatccagtacgataccaaaagcagcaaataaaacagcgccgagcaggagggagaagtgtaggaaataggtcgacagaaggagatacccaacagtgctattacaaggtcaattcagcgctccattttctatccatcacccaatcaagactttttggcaggattgagaggaggaggaaggaagacaagtggtttcactacttgttgccagttaaactggagcagaacgtgaattggaggcggaggagtggacaatcaatgccgatagcagcgaaactgtgctaccagcgcataatcatacgaggaaaatggaaaagggctctgtttttctctaggtgttcagggagttcatactttgtggaattatcccctaggttgtcattgacattcaggaacaatacacacacacaaacccacatctgcatttttgtggcaccatcgcaggatgtacactttattttgtttgtctatatgtgctgtttacctcttcttcttggcgttgatattgcgaccagcacccaccttgatcctcccgttcccagggccccttgacccggtgagaatactgggaagataatcctcatccatcagatctttgtactttgtgcggcgctcctcatccgtcttcctgacgtactccttttggtcctcagccaggattagctcattgccccagccgtttttgccgcctccaacaatgcgcttggtgttggaagagccgtgtgttggtttgggaatgctgtagacgttgccacggttgttgaactgaaagttcttcttgaggtgcaatgtgaagttgccagacgcgtccgtgctgcatgacacacgggtgagggtagcctgtccgcaagatgggcagaactgcttcgtggtgtccttgcagaccttccagcagccgtggcatcttagaacccaggtcttgagaaaggtaattttggtaaggctggtgtcaagcaggctgtgatattgttagctcattgctcatttgagctctcgcgcgaaggtcactcacttcaagttgattctgagcgcaacatttcgcatggccatatccgccgtaataagagctgcttgaagaaaccgctgggtttgttgctttccggcgccgcccttctccttggcttggtacttcttgatgttgctgggagctgcgggtgtatgtattagtgaacaagaacttctcagggtaattcatgaagccacatactgatccacccttcctcgtcatcatcttcctccgcctcagcctgttcaacctcagccttaactgacgtctggttcaggtcaaccttctccaattcttgcgctaccccctctggtgttgtctcagtcaatggcgcatccgcttcagtcactgtttctggtgcagcatcctgctcttcagttttggtctcctcctgcttggctggtggctttccgttcacggtcttttgcgttgggtctttcctcaagcgccactgttaaacccattagccttcccgaatatcccaagccgcatgaaaggcgccgtacatcaccaccattcctctcaacctccaactcatacgtcaaggcaaggagctgcaaatcgggcttcgacaacacctgcagatcacccgtcctccgcgcaaagccagtaacaaacgccatcgactcgggcttgggtgtcctaagcttgatgaatggcgcaagcgtcgtctggtatcgtgatcgggtggcttcatcgcgaactgaaagacacaaaagttttagtgaggcagtcccaagatgtcaatattcccagggccacacactctcggacacaaccgctggaatggtgtacagctcctccgcctgagaaagaagcgttgatactgttggatcgtttctgataatagcgttggcatcaatcaccaaggagtggacctgcttggttgaggtctgggctggctgttctgcgacgggcgcattctcgacgacttcggtgggggcggggtcctcgatcttgggcgcttgagcgctgggctctggttgttgttccatgttttcgattggctggatcctgaagatatcgagcagaatatcgaggagtccaaagatgttagcgattcgatcgttaggccggggcgctcaatatcgtggtcgtcctgggcttgtgatgcatgaatttcccaaaaattcatgtggggttgaactggcagaatttccgttcccaaaatccatcccacacgagccgaaaggcggtcaggaataagacccacaagacccttgggcccactttggacttcaaggcgtcttggcattatgaactgtcctgcttcattcactcatcatgatcaccgtccttatgagataggagggatcctcaaatcctctcaaaggtgatgatgtccgcgaaactatactgagttcgtttggcttcgtggctcttgcgtgatactctgggttttcggtgcaagaagttgtacatactcggtggaggggtgatgaaaacactaacatggatgactcgtagcaggtcaaacacaaaacgttgaagcaacattgtggtaggtgaacagtgttctcttaatgggggcttttatagcagcagaaagctttcccttgtcaattctgactcttgtttccctggtccgtataaacctgaaggcgttccaagcatttttcaacttcatggcaactgtggtgatctcaagagggttcgagttctaaatagcgttagagcagttacgacaaaataggcatcaaccttgggcggttagtcgtggcatagatggtcaattcattcagcaatagtaacaatgaaccttcatttcttcatctgcattaaggagagtatctacctcggggtataccagaagccaaattccaaaaagccaaaaccaccaaaaacatacaacaccagggattccccagtggtcacccacctgagtactggtctggcggtcaattgcttaactaggggagagcggacgggatcccgtgtattcaactgcctatggtcgtatgtgcttgtgttcacgggattgcgagttcaagacaccatgattctgctccatattccaaatgagtgtcatcatgtcatatcagtcattaccatctctcttctccatccccaccatgtctctacaacctcgtccccaaaaccacactatcagcagaaatattcgacttcttgggagggtcctcaacccaagggacacccctgccagagtcacgctgggcaataagtctgttctttctctggcgctcacgatagaacaggaaagccaagccaatgatggcagcgacaccaagaatggaaccaatcaccgcaccggcgatagcacccttggagagaccggtcttgacagactcaatgggggtgttgttgttgttgttgttgttgttgccgttgttgttcgatgggacagagctgctcgatggctctgggtcagcggtgttgagaggaggaccattgtcgccgtgacccgggaggttggtcgggagaccagtggcagtgggtgccgggacgtcgttctcagagtcggttgcgttgaagcacgggattgtgtcttgtgggaagtcggcagcgcggacatatcttgatttggtgttagtacagacacctgtgatggtaaaatggaaagaaggactcactggatgtcggcacaggcatagaaggtttggttctctggccggtcaaagtcggcaatatacatgagctggatggtcgcattggttccgggggcaatggtcgatggagggtcaggaatggtcagacaggtgtgccctggatcgatctctgtgatgggcgttgtgttcaggacgaagccaaagtccttttgctcttgggggtctgatgaacggccatattgattagcatctctctttggcgatggcagtagccaaagtttgaatttttgtataggcgtcgatatgaaaggaaataagcaaggatgcaaagatgcacgtaccattatggaatgagatgctcatctgggcgtggtaggagtcatcttgggctgtcaaggctattcttccgccgcctacaagcaatcagcaagtgtttcctcattagaatgtagacctaatgatgtcaaacatactcaaaggaaacttcgtccgttcaagaaccctgtggatagaaccacaaggcccctcattgtcagtgtgctcagaccaggctctgtcaggtggccacatgaacgaggcagggcccatgttctccgaggctgccaaaacaccagtggcagtggctgcaacgagggccacagcctgctgaaatcgtcgaaccattgtgttgtttggatagggtgacctgataacaacgaagttatgcaaagaagattgaagatggtatcccaggaaagattgagaagggtgcaatggtgtcaagctggatgagaagcgggggaatgaccactattcggctaagatggaggatgccgcttgtgcagagaaggataagacaggaacatgccggtggccactttggttccgtcctcctcctcttttatcttttcgtcagtcctgcccaaccaccacccccaccacacatcacactttccaagactccgacatgtgttgttaccaatgccgtatggtagcgtatcctcggcatagcaacaacttgcccagaacttgcgttctttttctgctttccccgcgagatgggcgagaattgttcctggctgctccgctctagccaagatatgctacaggtatgggtctcgacaaagacaggaatccgggttctgcgtgagataacgtcgccggaagccgaacgataacttggcatggcagcggtgtgatgagagtgaagagtgtcgaccaggctgggctgtcagtccagtgactctgagttttcagcgaaccgcaccgagcccctcgtttaggcagtcaatgatctgattcttttcagtcaccggcaggattgaccaacagtggcattcaatggtaccctcctgcgagccctcccatttgtcgtgatgggatctgggagacttggcaatcagatgatcagataaatttgatcagataactttgctcggcgcagtgggcacccatcttatcagatgcatcaccggaagctgattggtggttgtcagctccggcgagcttgggtccacttctgtgagccaggatgttccacagaatgaagagccgacatcgcagaatgccagaatgtgcctcacaaatccagtttgtcgtgaaaagatacccggaatttctgattgaatccttcagccgactttgaactgccaagttcgttaggtaatatccaccctctgccgccatgcatccctggccaccccgaaccgtctgacccgacattgggttgacgctcgacggggtcaaggaccatcctcattcgacaagggtacattcagatatattgaggtacacccgcctctacctttctcgtagccaatcccaaaacctccccgtatttacctacttcatttgaccccatccttccctcccagtgcaggccccatctcttgccctcctcgtcgttatttcttgcaacatcttcaaaatgcgtggtcttcagttttccgtcctggtctccgccttcactgcgactgctgttcaagccgctgtttctcctcaagacaatgtcgatgtcgctgccctcttagcccgccaggcccctggcactccccagtttgaatgccattccgactgtggtacgttgaccaacctcaaccaatatctcacccacaccggcacctctaacaatagctaacacctgccgttacaggaagtgcccttggtggctcacgctccggtagacattgcgacaactccacttgggtcgagctgttcgaggactgtctcgaatgtgccaatcagttcaacatctggcgccattacggcaatggtttgacagccgctgctgaagcttgcggcttgtctgctgtcccatcaccctcgggcggagcagaggagccagcggccaccacaacagtcactcccgtcggctcttttgtcacctcagaggccccggttactgtcactgaggatgctgattcgtcttctacctctgacgccgctgaaccctccatcaccgaacctcctcagacaggagctgagacgaccgcacccgcctcggcctccaccagtgtatgttgttgccttcccctgaaagccttggtgcctcatcgctaacctgcgggcgttcaggagcctgttaccgctggtgcttccggtctcgcgtatgtttctgtctcgatgatgagtgtcgggactctacttgcgatgttcattggcacaatcagctggtaatcaggaagacccaagtaatggccttgaaagagtggcacataataatggtttggatgtaatgttagataatctttatcagtgacctggctttcccttcgcaccacctatcgagatcaccagagtagcccatcatgtatccaattctctcatagcatcctggttcattgatagttgacgtctccaccttgccagcccgtttcaagatcaagcagaactcgtcagcgtcattgtacaggcccatgcggagacaaaatatctcttggccaactgtcaccgtgccatcatagaggtattcccggcagtctataaacatcagcctctcgtccccattgactgtcagtagaaggtcgtaaacagatgcagatttggggtagcgcagtatcttgggatcgacatgagatccctgtttcattcgtccggcgcaaatagttcctgacaaaataacgtgccccgattcgacttctcccattgcgtctggaccagctaggagtacgcttgcatccacaacgctgcaagcatcgttcttagcccgttgtcggaatttgttcatggcgatgggtccgtcgattgatacccatgaccagcttggcccgcgccaccgctgtggtacctgcttatagccgacagaccaccagcataaatcaggtagcagcgtgcttctccatagtcccgcaagatattcgtcatccggccgcaaacgtctttggatttgtttggccactcctgacaacgctggtagcttgtctcgtggatatgaaagacttagcgctgtgtagcactctactgctctcccccagggcgtctcattaacctcgtggttggcggcttcttcaagactctctggcttcttcttgggtgccttcaaagcagcctcggagagagaaagtacgcgtttgtcgagtggctcactgtgctttggccggtaatcgtatcgcccaaccccagggtgacattcgcacgtaatgagttctgcgcattcgaagaggagctcttccttggtgaagtgcagtaatcggcgagatagaaggcgctcttgaaaaacccaggctcgtgtcaggagcggaaaatacttccttcggttttcgtggtggtcaactccccaaggcaatggaagatgtcgattcgacaggtccgttctgaccagcagctcgtaatctgttccgtctggtcctttgactgtaatttcttttggccttctttcggtaggtacgtctccatagaatccaccattgtcatcttctgatgcagtggcacactatagtggaagaagagatgctgttagtgaggaccccagagagaaagggaaagagaacaaaccaaagtaagatggctattctcgtaaatgaagatcatttcagccgactggtgctgccagtccgtttccgagtcttgtataatgcacagagagtcgatccacagatagtcaaatcctagacgccttgtaacatcaatggcatgttgaaatgttgcggggagattgttccaaacaatctcctggcgattggtctcgagggtccatgatgtagtcatgcatttcggtctcgaaccaccccagcagtggggaagacacagatatggcttcgactcaccgggacgtggctcatacaacttgacgggtagttggcgaacatcaagaacccttgccggtaaatttggagctccagacaccctaccacacattgagtgtctttcctcgcaaaccttcaaccaagcctgaaccttgtcaaagctcacgccataatccttgctagggcaggccaatcttgggccccaaatagggatgtcaggaaatggagatggcttcccaggagcggtcaatatctcaaatgatatggcattcggaaggtagtacgcggaacctccggcagacgataataggttagaccatctcggaagtacgagtgaaccgtcgttctcgacttgccaaaccataaagtgattgggtttgttgtctgtgtcaaaatctgcacattttagaatcccttgctccacacaggcttctccaaccgcggacgtaaacacgcagcgagcgcaagtacttgggtagattcctcgtgagctcccaatctgaaggcaacggtatcctgggagggattcgtctttaatcctggaacaagaggggcatgacgagatttcattcggacttggtggtcttgaacgaaggctgtcgagtatatcgttgatgtcgttgagatcgtcatcgacattcgccatttttcaaagctgcaaaaaggtgatgtgcggggttggcactgttggcaggctgttgggcagaaaatagaaaagaggggcccccggtccaccagcacatctcatgcaacttgttggagtcggaaggcactctcacttcctctattgcattagacaaaatttacgacctctttgttaatctcaacatcaaatcgcttccaatccaaaataccccgctgcttgatctgatcgggttgtgaggatcaaccaacgccatatcataccgctgcaatagctgtgatttttttctttgatcagcacaggtatagattcttcaactgacacatcaaccgaacacctacctcaaaaaagatcttgttcaactccatcagcgcgattcgcttccccagacactggtactttccattcccgaacgcaagctccaacacagagttcatcaacttcagccgctctgcgtcggcctcctcctctagccagcgctccggtcgaaacacgtcagcatcctccccaaatacctccttcaatcgcattactcccgagtagttatgcgagacttgggtgccctccggaacatggaacccgcaaatactatcaccacctttcggcacctgcttgctgcccaggccaacaactgatggccaggttcggtagccctcgcgaatcatcgcttgcagatacggaagggcttgagcttcgacatccctaatgaccggacggctgacgcggccggaggagacactctcatctatttccttttggagagtcgcatacaccgaaggggtagatatcaaggccaagagggtatgtcgaatagctgccgccgtcgtaatggaacctgccacactgatttatctctggttagggtcaccacatagtatcgaagaaaggcctcttacatctgaacaaacatatgctgcaccagctcatcctccgtcatcccaccattgataaaagcctggagcatatcccgccctggctctgcatcaggtcgaagccgctcctccacgcaacccgttgccagcctaccgggctgtcagcaaaaagtcccccgagcctcacgagaggaacaacataccccattaaccggccaaacccaacgccgtccacgtccctaggaagcgccagattgaacggccagcgataaacgatatttgtcaaggacggcacagcctgaaggaaattcatggccggaagagcagagtcattgatctcaacgaactgatgcaaatccctatcctctaccaagaacccgaatgccttaccaaacgaagcatcgctaatgacatccaacgagaagaaatgcgtcttggcacaaagatcaaacggccgcagattgccgggcgaggagacatatttgctttcaatcaatgccacgaggttgagcatttgtcgatctatactttcctcaaagcctgtactcccgttttctcgtccgttgtactgtttcttttgttagctctcctccagtatgagttacggttgcaacggtcaccatggaaactgtccacttacagcccctgccatctttgtcctcagcgctttgtgtttctcctcatcccgctcacaaacaatgttgttataccccgggatgatcctccccgtctcgtaaaagactccttttgtgtaagccgagcgcacgcttgacatccggcgcaaggtctccgggtcggtgcaaagcaggtcgttgggtccgattcgtaccaaggggccgtatttggcggcggtggcaatcatgttctcgtggaccttgccgctggtgagcgttttgatcatccaggcggatgagaaccttgcgagtgcggggccggggatgtgacggaggcggaagtaggaattgtagcaacgggcgatgtaaactgccagtgcggtggctaggaagagccataatgtggtcatcttgacgctggtggttgtttgggctgagtggtttttgtcgggagaaaacgaggagctgccgtcaaagaaatcgatgccaatgtcagctcattcttggcgggtcatgctggctgcgagggtggtgattggtgatagctctagctacttcaacactagaccgctacagcgattttgtccttggagctctcaatgctctctgggagtgctaagcatcaagcgaggtggcattctcatgcagggcacttggtcacctttccaaaaccattagcagaatgtcagccacaagtcactggcaaaaggcagtcacaagaaaaagctttgccatgaacctcattgtagattggtcagtctagaaagatcccctgaaaccggaacgccttgttattcagagaaacattcacccaaccctttgtctacccatttccttttccatacgcccaacccattccgacccatttccagatgtcgattgaaacggggaaaaccagctaagaattgagagaaaggaagctgatgccgtgggcttaagaagccgggccatggtagtcgcagcggtaggagctgatacggtcgttccaccaaccattgccatcggcaaggttttggtcgttctcgttcgaatactgggcgccggtgcaatccgcaccactattttggttgatgatggttagcacactggccatgtcatgaagcgaagaggatgcacttactcaaaccagtggcagtcggattggtcgacattctcgttggcaatggagctgatggcattgtcaaatttggcgggaatgttacctgagaatgggacgtcagcaagagtaagaatatgaaacagcggatcggaatacttacgacactcgccggtccaagagtaactgtgagcacagtcgccctgagaccagatgtgctcgcaataatagatatgcatgcacccgtcaactccggggttgcactgaccacggtcacccttgggacagaaagacttcgtggagtcacagttgtcgcgggcctcgaccaccgaagtgttgttaaagttggccggggctgcaaggacagcgagccccatggagaggatggtagcaaagaaggtaacagagaccattttggtggtaatgagaggcttgggcaaaggtaaaagagtggcgaatgggtggtgggacaggttagatgtttgagaacaagagaagaagaagatgatcctgtcgagcctgggagagaagagaattgggagggcggaagagaattgggagggcagaagagaattgggagggcagaagagaatgggaagtgctcgatatatactgggaatttgtgacccacgctctacgcgtggggccttgcgaattccgctatctgctcgcaaatctggttatctcgagcgaacagaagagtaaacaatgatctgtttgcctgcttggtctccacttgggaacaagtgacaagatcagattgagattgggagtcacagaatctcggccagtgatgtcgtttgggccggccgagtgcggctctgcgcacgtcattgcggctctgctcggcgtcgttgcggcttagatacggttggaagattttattggaggagaaaaatgcgtgtgtctggtattttcttggcagaggggagttgggatgaaagcaggaaaggcaagggggtaatagaggctttggaagcacacccctctccattcactcagctaagcgggctcggggagtccagtcctgaggaggatcttgttcaagagctctgtatctacgggatatggcaaggaacaactgaccacagacaacaacgatgatgctttggattggccgaaaggccacctgtggcgggcagctctggtttggagggactgatatcatgacttgtatgaacggatatacccattgtcagctccttttttccgcagaagctcatgtcacccagaggctctgcgtgccggttgagccgacttaagcagtaggttgcatgagctggcacgagtgacaacttcatgcggcacttctttctgcttttcacgtggtttcgtaatagattggtgacctcaagaccacgaggaaaccattcacctggcacaggtgacggtgagtcacattaggtataaatacggctcacaagtcaatggcgtcatgggaacctttcgcgtaggctttctgtctcaagcctggcggttctatttatcgtcagcagactcgctttacctcggtgtagaaaaccactacgtagacattgttatagtgccaagggccttggtgaattaaaaggtcgaaggacagggcagtataagggtagcttgccaataggctttaccaaaggccgaagggagtgcggcaaagtaaccttttccacctatatttaggggagcacgctcttacctagcggaccaattatcttttcctttccctagtagttaattcaactttttattatggtttaaattctacacaggaccaagtcccgtatcaaacatgtcatgggatccatgattcagtgaaggctcctcgtgtatcgtaccaaaaggacgtccttagccaaaggccgacgcaaggggtatatccgctcacagattgtgtgtgcttaacacttgtagaagatcatgacaattaccatgcaacttcaagccaaactttgggcggtaagatatgggtagagagagccgggggagttctcacagggcaagtaacgggaccttcagccctaagccgaacctttccatcttttgcatattgcaatcacttttccagggaagctttggtctcaaacatgtgccattgtgcagttcagggtcaaagtgcaggacaaaagcctgggaaaaatacatgaaacaaagtatcattgactggccaacaatgactattgagtcgtcaaacgacctctatcataaaactgcaaccatgacccatcgctgtaccgctgctaaaccaataattccatccatgctgaatacctccataatctgaattatgcctttcccccctaattcatctcctttttgaattccacaccatggacgcaaaggctaaactctgatcatcccccttgacctgcacaatcattctccttagttccttgaacccatgcttgacatacaaggcctcccccactggtgtcgaaatgacattaatagccttttctttttttccttgcttcctccttcccccactccaacaactttgttgccgcaccacggcgccgataccctggcgaggtagagagctcggccaattccatgcgtctctaaccaagtctattctggtaatactcctaatcccgcgcgacggcagcgttgagggccttcatacggcactggctgatgttttcttcgctcgtatcggggggctgcttgtcggacggcttttctagcggttgttccggctccttggtgagctcctcgtaggtggtgttggtgatatccactggctcgtcattcgggccgtctttgggaactttggtccagatggcgcaggcggtgatggatttgctaccctgcatgtcgatgtcgcctggtgttcctgagtcggggacatttgcaaccatcaagataaaatctggagagaagaggcaaaagtggtattctttgcggagtctcttcaagtgatcttgacggtattcttctgggtagaggtagggtatgttttccgcgtatggtgccacgagttgggcgattttgacgatggcgtcgaggtcgccttttacggcggggcggattgtgatggacattttgatggaatgtaagagttgaattcaaagctatggaaagtcatgcgagaagttaagagctagaaaacaaacgtgcccagattggccggagcacccagcggagcgacctcactcagacagatgaccagcggatgcacctgcccaaaccgagcaggcaggtacagccgtcataccacatcttgtgtggaaaaggcgcctttccggtctgttagccggagccttgagactgcggtttgatcaggatgatgataaactttcttcacagttgaggtatcggagcgatgtgcctagaccgtcccgccagtcgcagtcccaataatttacctacttgatgatcagactatctgatgcctatgaatcaaagaacctcacacccctaatcacaaccttcggcagtctcgtaacccccatcctctgctgctttatcatatacatcgccacggcaaactcatccttggtaagatacccatccgtatccacatctgccagctcccatatctgacccaacaccagatccggcagtttggaattactcaagaaaacacacgcttcctcccctctgatcatacccttcccatctgcatcaagcctagcaaagacctcatcaaaccgcgccttatcctccggctcaaccaacctttcccccctaataagatctaacaccatcccaaactcctccctgctgaggaaccccttgttgtctttgtccacctgctgccagatcctccccagcgtttccactggtagacaggactgttcaaaaaaggggcttgcttccgtgccaaggaggtatcctttccctcctgcgtcaagctcgttgaagagctggtcgtggcgggcgcgctgaatgagctccattgcatgagcgaactgtcctttggtcaaatatcctcggttgccttcgtctgcctggtcccaaatttcagcaagggtttggcttggtaggttgaactgttgaaagaacggcactgcttcgtctccgtttataattccgttgctgtcctggtccaaagtttcgaagatgtcatcccactgggatctaggatcatgtggtggttcctcggtgtacattgtgacagctccggtgttcttaattattcccagatcctgatccccagcggttgaggggatcgtgaccgcggtgcagacatctatcacctcttccgaatccgaaccgacgtcgtgcacagtcaccgaaacctgacttttagcacccttaagacatttaacagccaaaagagcaacggcatccagcgccatgtgcagtgtatctcggtgagccttcaacaattcccgctgaccatcaacctcagccttaatcgcaaacgtccactgcaggccccgattggagcgctcgcagccgccaagggttttgttgatctcctcaatgacattcgagcagttcccgatcgtcgaaagagctcggttgtgaacatcctcgggtatggcgccgtcatcaattacagccgtatcctctctcagcaagtcgagcacgagctgaagctgcgccaactcgcctgtcattgccaaaaggtcagaccttgcgtctcgggaacgccgacaaaacgtagcaaccgccgctgccgtttccccgacgacggcgacaagatctaaaagcgcagtagtgatggataccggagccattttcggatcgatgatggacaaaaagcgtcacaactctcttctcacggaaaccacgagcccaagatttcaagcctacaaccccaacccggctgagcccaagctaacccaatcctcaccgtattcctcaatccaactagctcttcagccgcaccaccagctgtccctcttctattcgtaccaataactcctctcgccatcaaccccttccgaacaaacacccacactaacatctccgaggagaaacccaaaaaagaaatttactcccagggttaggatcggcccattccgttgccatgcaacacagccccctttatgcagccccactcccccctgaatccgctccaatcgcaaaacacccaaaaacaggagataaagtccggcttcttttctgctgtaccccgtaacacagattagtcttgcaggcactgccttcttcttctctttcaacctctatctccaaacaggcccattccttttcccagaaaccggattattgtacgcggggcattgctcgtacctttgctgcgctatattttgaccctaaccctgacataccgatcgggggggttcgaggggcaactacacacctacgtgaatctcaatcagcccaccaactgtgcctcaataaaagaggcagattgcgaggttgacttgtggtttcgaatctttaaacaatgttgggtgaaatacagagtgaaagaaagcataaaggctgaggcatgcgcactggtttctcaaacatggttgccctgaagcatctggcatgaagcatgagtagctgtttatctacaatggtctgtaaagctctttcttggggagggggagagggtaagactggaaagagacatttcgagattcatttttggtatcaataactatttccctgcccaaactccacccccaataaatctaccacaaaggcaccattccctgttgctccacaaacggcggcaatcccagtgtcatattatcctgaaacatccccccagtccccatgacaaacccaaagtcattgttcgtgtacatagtaccagcaaaatccacattcgtgggataatcgaaaggcagaaaatcaggccccaacaaaggtgtgctggcccgggacaaggggtccggaacacccaacagccctacgccagtatccgacacctcccacgtgggatattctacagaaccggacataagaagtggaggatccagcgtaatgagtggcacagagaactgttgttgctgccgtagctgcacgccatgctgcatattcgcaatcagcccttgtgctgccgttgctgccccgtcaaagagtctttgcctgaatgtgtctgtgtcgacgtcatcggcgtacagatttgatgtgacgttgatgctgaccgccagcaacaaattgaacttggctgccaccactcctaggtgatacctcgtctgccataggtcttgcaggaaaaccagagatttggtcaacagctcgcggaagacacaccctgtcctttgtgggtggcagagaatgcggatgttgtctagctggcgtagtcggccaagaatccagcaagatgccatcgccgaacgagcagcatcggtccagaatagctggcaggccatgttgctcacgtcagagctaatctggcataaactgcgaaactgatgcaaaacagaagcggcattgtcccacagttccaacagctgactgcgttgcgaggcctctggagatgtgcctaatgtgccgcccagtccagtgatagagaggaagctggtcattgggatcgagatcagagattgctgaagctcctcgattggggctgtaggtttggcgccagatctcagtgcaggtggtagttctgtcaggaacttcccgaatcccgctcgaagacgcgcctgaagttcgttggtagaaggaggttgggttgaataaagcgcttggtgtaaaggtccaatgacttgggccagctttgctgcagcgaccgaaaacttgatgtcattttcggctgtcctttcaagatccgagtctgtcgttccgtcggattcccggtctaacgtacggagactgatcggcagtggtaatgggcagtcgctttcctccaagcgcaaactgaactgtgttccactacgtatcgagtactccaaattcaaccgcacgaagcaccaccagaggcgctttctgagctcggcaaaatacggcgtgacctccacgaagagtgctgggtcgcgatgaagacccatgctggttgtgatatccctgatcagcccatgaagcggaagcaaatcgtacatcttgtccgtctccgacgccaaaatgctcttcatgactgctagtagcagcaaaacctgtaccacaccacaacatggcttttggaactttggtgtatatatgcaattctcgacagccctcgccaatctcctcccacggtgcctctcttgttcgctgctctgcatggctatgctgacggctagcaggattttgcatatgtgcaccggatgatcgagggaacctgaataaatgcgatccaaatccctgttaaaagctggctggtcgaggattccgtacaggcgcccatatgtctggaagtatttcgcgatccacgcctcgcattcctgtcgttcgggtaatagcgatcgaaggctggcgctgtcccttcccactgacggttcggagacattgttgtatgtccttagctgagctttgagctcggcaaatgccttgcgactagtgtgaaattcaggcgagtgatccaacattgccttcaacactgtcatctcgttacatggagccaaccaatgactcaggcccatcacgcgagtcttgaacgcagtgcccttgtaggcattgcctctcggtgcgtgagcaacattctgcttttcggctggtgatggcgttgttggtgtggactccggtgtttcccctcttgatgagcagctgtctggtggcgtgtgtgtttgtgtcgggccctcaggggatagttgtgctgatggtgagggagctgaggacgatgaaggaacgcgcagtcttgatcgcgatcttggaacgccctggcggtctttgggagtgctgtaaatacactcggtggcgataccacgatgtttgcattggccacagggagattcgcgatcgcatcgtgtttttcgcgttcggcacttccccatgtcaacatccaatgtgatccagcttcagtctcagtggggactcatcttacctgccagcaagacacagcttcccgaactctgggtcgtttcctccctttcagctgttgctcgatgaacgagtcagcgctcatgtggctgaatgttaaagtcatgtcgaagtgccaacagtcggaacctgcgagcaaaatatgttcttggactttcccaagattgaaacctcagggaggagagatcgagatcttgatcccacgcagaaggaggacagaagtgaagataaatccaagctccgggatgcgtcattagtcactcgggcaggactcatgccgaacgaaatcgggagcggaagagagttgaggcagtaacattgagaaggccagcagaagccggatggaagccaatggcgggaagggaatgtagcgtcgggttgacatcggtcaatagtgtcaatacctcgagtccttttgcagggggcggtgcctgcatgattgcattgggagaaggagcgaccacgagagatgaccggaaagtaaccccgcgccaccaccactaccaccaccattagaggcctgccatgcattgcagaccatgcagaagcatcaggacatcttcaggtggctggaggaatttctactgcaataccagcattattaatcacggcccatacattggtgtcggctctttcaatagtagccatcccaagcgcccttgggaacacgacattcctctctgcatctcctcgggcagaaatgcaacgaagctttccttttgttccactgcataaacacagcccctgacaccacctcccctcaaaagcttgcgattggatcgatcagattaagcttttccctgcttttcccaacttcccacggcaaagtgcggggtctgacccgaccagctgggctcatggaaaggtggtccggaaaggcccccgcacgtgaccttccatgcgcaacttcgtatgcacatgtagggctgagcctcagtgaagctgcagctcttcaagggcggtcaagaagcaagtcgatattgcgactgctgccccgacgtcgacgtcggcgaacgacggaatactcatcggatttccattggcattgagcattctggagcaaaacacgtcaaccggcaaagatgaggcagtgcagaaaggtctgtagactggtgactagaagaaaatgcaaaagtaacgtgccatggtattgttaatatcgtcatatatggagtggtgtgttacaaacagtgtcatctcatgaaccctaaccctcaacattgccatgtcgtaaacacccaacatgcaaggaaagacaaaagaaatctacggtttatgtttgatgttgtacaaagattaacaagtcgtgtctatcggatcaaaccgaaacctccttcttgccaccgcatcttggagtcatccggacattgagcccagtctgagcaaccatccaatggttttgcaccttccagtcgccctcaagcgtcatctatcagcaatgttagcatgcggtttgatgtactttttgggagaagacttacccgataccgccaaaacaaagttggaatcagcttgtaaatctccaaatatgagatattcttccccaagcacgtcctccgtccagctccaaacgtcaacagacacctctccatcttgacccttctctccctctcacacaaccacctctccggcctgaacttgtctgcatcttccccaaagacctccttgctgcggtgaacaacccaaggattcattcccacaaccgtccccccctcaaagtgcacgccgcaaagctccacgccacctttacccaccaccctctcaagcggcagcccaatgacaggatgtaacctgcccgcctccttaacgcacgcatccaagtacgggagactttgagactccttccatgtgacattatccgatagtcggccctcgctattcgcctgtgaaagttcctccatcagcttaccaagacagtccggatgtttgatcagaaagtaaatgacggctctcatcatgatggcagtcgtatcgctcccagccaagacattcgatgtcgcccaagcagtgacgaaccagtccaggatatccgggttcttctccttggcctccagaaagcgagacatgaagtccttggtattatggtacgtggtcgttttctctacttcgctgatgtttgatctttcatgcgctctggcgagagcaaacgccacaatgggggagctgccttcgggaaggaagcgcgcgagagggttcttcgccaagatgttgtcaagccaagggatctggccaaccttttacaccgttagcgttcagggaggagggtccaagttccggatatcacttacccatgaggcgtacttgaagaccttctgaatactgcccatgatcccgtcgacatcctttgcttcatcaagaaaaccaagacgtttgctgaacgtgatctcgcccatcacgtcaaaggcaaaccactgaagccatgtcccaagatccactgtttgcccatctttggccgaaatttcatccaacttcgtcagaaagaaacaaatagtggtgtcaacatgtggctcaaactcgactagattcgacatcgagtatatattggcaatcggtctcttcatagcccggtggaggtcgtcatcctgggtgttgaacagcccttggatcaccctgccgcgtgacatgggctgcataaccttgtagaaatcggactagtgaaacacatctgtcagatctgccgtctcttctgtgttacagcgtcggagttacctacctttttgagattgaccccagtaccataaatctttaggacctcttctgggtcgtcaatactgatgcagttcggcccgaggcgtacaagtctaccaaatcggtcgtgcagctgcatatgaacatgatgtgcttcgccagaccatgcccatctgagcctggggagattcgatatggatgcgaagaagggtccaggaactttccgatgtcttgcccaggatcgatatgtcaacaccaccacatatatcgccccaaagaccaatgcagcaagttgaaggatcatggcgtttacatgaaacaaaatgttgaatgtaccacaaaccgaaaacctgcgttatcaggactgccgtgtgcttgaagaccatgctcggttgatcagtattaaagcatgccgcgtactggtgctccgtcgatgctatatttcttgtcttgactcaagtcttggcgtttcgtggggggaactgttctgcggtcagaccgacaaaatgctagctgctttcctgtctgggaaaataagacccggagctgagtagctatgagtgactgtgccggtcccatgtcacctttaaacatagtgcacgggagtggcaatgacaactgccaacatgcaccaagccacgccgccgcaccgtttaaaccacgggtcgttcgttagcgcaatccaggctaccggtgctgggcacaccgatggggtaacgagtaaacattgcgtgggatctagactcggaataggaatccttctggaaatgtccggtcctaccgagcggtgaccatgtcaatgactgatgttttggttcggacactggcagaaggcaggttttgacattgatacgagcccatctttgacagcgttgatggctatttccgtagttgatgttaaagtacaaatgtggagcaggaaggaaagctagagccaatgtcagtaagtgtcgtggtgattgtataagagccgtgataccagtgcactttaccaagatctctgtcaaacaaataccgattgtactgctgcttcctttcatttgtgactattgcctgtctttgaaccaccaccaagaaaatgacagccaacactttgcttctctttggggaccagacaggggaggtcctaccttcaatacaatctctctccagaaatgcttcatcaaatcagaccttggcaacgtttctgaggaaggccacagatagactcagaagtgcagtacttcaagcccctgctcactatcgacgctcctttccaaatttcacctctctctccgagctcgccgccgccgtgtcgaaacaagatcacccatcccctgccttatatgccgcacttctgtgtatcgcgcaaattggcgatgtcatcatgtaagatgtcctgtcaaacaagcccagctcctgaatgctgacagctcagatatctcgaaaacaacccagggctcctagacgcttctaaggacaggcttgccattgtcgggttatgtactggccttctccccgccgcggttgtctcgtgctccagaaacctcaccgaagtgatcgcacttgcagatgagactgttcatcttgctttccaagtcggtcttgcggcatcaaaaaggtcccacgaggtagatccatccactggcagctgggctactctggtctcccaggtcgatatttctgccgctagggaagccattggcatcttcaaccgcaactcgatccccagacaccaggtatacatcagtgctgagagcccaaactcagtgacgattagcggcccgccttccgctaccgaagctttcttcagctccacctcaatcttcggaaaatgcaaaagaattccacttcccattgcagcggcctttcacgccgataatcttcagcccattcagcccacagtgcttctccagaatatgaacccttctctacactcgaaacctgtacaacatccctttcttctgtctcctcattcaggcttgccttatcaagagtcgtcattcggtaatgttttggtggaggttgtgggtgacatcttccggcatcctatattgttcgacgcatgtactgaagggcttgccaaaattctctcatcccaaccgaaccttctggcctttggaccagtgagctgtgaaaaggccattcagcaagccctgcacggccatggtatcaaattggagactcccagtactgcaacgacgctgaacaacacttcatcgatacccaacgccatagccatcatcggcatgtcagtccggctcccaggaagtgagagcctagaagatttctggcaagtgcttgaggacggccgcaatctccacgaaaagattcgtcctgatcgtttcgatatcaacacccatgttgatccttctggcaaggccaagaacactagcttgacaccatatggtgtgttcatcgatcgacctggatacttcgatacgagactgttcaatatgtctccccgtgaggctgctcaaacagaccctcagcaacgactgctccttctgaccacgtacgaggctctcgagatggctgggtacactcccaatgcaacgccatctaccaataccaaaaggatcggctccttcatgggccaaacaggtgacgactatcgtgaggtaaacgcgagtcagaacgtcgacacgtacttcatcactggcaacattcgcgccttcggtccaggtagactgaactatcatttcggttgggaagggccgagctattccgttgacacagcgtgttcatccagcgcagctagtatccaattggcctgctctgcgctgctcagtagcgaggtggacatggctgtgggtggtggtgctaacctgctcactgcatccgatttgtttgctgggctaagtcgggggagcttcttgtcaaagactggaggttgcaaaacctttgatcatgatgcggacggctatgttcgcgcagacgcagtaggtgtcatcgtgctgaagaggttggacgacgcattggccgacagagacaacatcctcgcggtccttcgggcaacagcaaccaaccactccgctgaagcatcctccatcactcatcctcacgccgagacacaagagcgactgttcgattcagtcctaagcaaagccggcatcgaccctatcgagatcgattacgcagagctccacggcactggtacccaagcaggtgatgcaaccgagagccgatctgtgaccaatgttctttcccgtaaccgcccggccgacaaacccctgttcatcggcactgttaagcccaatctcggccacggtgaggcggccagcggtgtcacctctctcatcaaagccatcttgatgttgagtaagaacatgattccgccccatattggaataaaaggccggatcaacgagaagctaccaccgctggctgacatgaacacccggatatcattcggtaaaactccattccgcccccgtcctggcggtgatggaaagagaaagatcctcatcaacaacttcgacgctgccggcggaaataccagcatggtcatcgaagatcctcccatgttaccaacagagggtgtggatccccgcaatcatcatgccattaccgtgtctggcaagacgccaaactccatcatggggaacagcaagcgtcttcttgagcacttagaccaaaatcctgacgctcgtctagaggacattgcctacaccaccactgcacgccggatgcatcataatctgcgcaaggcccatgttgcttcttcgatcaagacccttcgggacagtctgcagcaagccatcacaagagagacgtggacaaaggtcccggccgcgccccctcaagtcgtgttcctcttcactggccagggttctgcgtatagcggcatggcatcaaacctgttcaataccagcgcaccgttccgcgagcttcttcaaggcaatgacgatatatgcgtctctcatggcttcagatctttcctgccccttgtagaggacaagaactttgacatgacgatggcctcgccggttcaggtgcagttggcaattgtgtccatagagctagccatggcagaatattggaaatctcttggggttatgccggctgccgttgttggtcacagccttggggagtatcctgcactgtgcgtcgctggtgtcctctctctcagcgactgcctgtatcttgttgggaaaagggcaggtttgatggtatccaattgctcgcctggtacgcactcgatgctggctgttcaagcagaccaaggtgacacggaagcactcctgaagagtgtcgatgacgattccggtatcgagattgcatgtcgaaatgggcctacgtcaatcgtcgtcagtggaggatcggatcagatacgggagttgcaggagaaggctcttaccaggggcctgaagacaacagtgctcgaggtacagtatgctttccactcttctcaaatggatgccattctggaagacttctcgtcggttgcaaaccgagtcaatttcgcagcaccagccatacctgttgcgtcgacagttttgggatcgatcgtcgaaggtgcaggaatcatcagtgccgaatatctgctccggggcactcggggccctgtgcagttcatggacgcggtcgaagcggttaaaagtctgcaaaactccccaaatcagcaaacagtttggattgagattgggccaagcccggtttgtgtcggaatggtgaggtccatggccatggaaggagctgctgatcagctcctcccctcaatgaagaagggcgaggacgactggaagatgctgaccacatcagtggccaaagctttcgctgcggggctcaacatcgattggcgtgaattccatcgaccctatgagttgtctctgcgtctaactgcgttacctcattacgctttcgatctcaagaactactggattcaatatgaaggtgattgggctctgcggaaaggcgacgcagatggcctccctaggtctcccgcggcacaagaccgcctcacaaaactcccgtcaactaccctccatcgtatcgagtccgaggtccgtgacaaggctggtatctccgtcattttcgcatcagatgcttccgagccgaagttgaacaccgctctctgcggtcatcttgtcaatggcgcagggctctgccctagttctatctacgcagacatggcattcactgctgcatcgtacatcctgggcgacgcagggctcaatatgtccttggatgtccgggacatgcaagtcgacaaaccgcttgttattcaaccaggggatacgaagcaaattattcgagtgtttgcgacgaaaaagattggttccgaccaaatcgaagtaacatttgcctctcaggatggaagcagaaacgaacaccacgccacgtgtagtgttgtatgcggacgaggagaatgttggcaacacgactggtccaagacggcatatctaatcaaggcacgcatcgaaagtctaaaagagtcctccaacaaaggccaaacgcacagaattctccggtcaatggtgtacaagttgtttgcagcattggtggattacgacactcgataccaggggttgcaagaggtcttcatggacagcaacctgtttgaagcagcggccaatgtgaaattcaacacctctgacagtgatggcacattcaaccatagcccatactggatcgatggtttctcccatctttcaggctttgtgcttaatggcggagagaggacccctgccgatgctgtttacatttcccatggttgggatagtatgaagattgttggtcagttgtctgctggtaaagagtatcagagctatgtccgcatgcaagatacaagcacacgcggagtaatggagggcgatgtgtatctctttgaaggcgatgtggtggtggctgtttgtcagggtctgcgatttcagcgcatccaacgctcgattttcgaccacctcctcccaccgccaaacaagccctctaccccttcgcaacccatgccgagcctcggtgccaagaggcaatctttgaactcgcacattccgacaatcaaggttgagttggtggacgatgatatcgtgtcttcggattttgaccaggtccttcaattggtagcttccgaggtcggtgttgacgttgaagacctggcagaccacacagtatttgcagatctgggcgttgatagtttgctgtccatcactatcaccgccaagcttggccaactatggggcaaagccataccggcgggtcttttcaccgagattctgactgttgcagaactgcgccggtatcaccttgaaaacattgataattctgaagacgacgaccgtgcctcgagctatggcggaagcacttgtggaaacgacattttcagccagcctcagagtcaggcatacactccgtttaccaacacagggctttccatcggcactccagtagaagatcgagctggagcaatcagaaagatcattgccgctgagttgggaatgagcatcgaggaaatcgacaatgacgtacctttggcggaccttggtgttgacagtctactatctttgtcgatcatggctgctatcaaagcacagacaggtcagatattcccatccagctttttgatggaatatccaagtttagcagcaatcgaggctgctctcggccctcgccgaacactaccagcccaacagctgttcaaagccctggaaaaggtgcaaaacaacaagagcattccacagtctgaagctgtcttgctgcaaggatcgtcatcttcacgagaacctgccctgtttctgctccctgatggctctgggagtgccagcagctatgttggactgccaaacctgaaactatctggccctgtgtggggacttgacagcccatttcttaacaatcctgaggcattcaccattccgctggaagaactggcttcctcatttgctgcagagattcgaaacaaacaggctcacggtccgtaccgactggccgggtggtccattggaggaacctacgcatatgaggttgcactacaattgttaagccatggagaggtggttgagtctctgacactcatcgatgcaccatgtccggcttccctcccgccactgcctatcgaaacgatctcattactcgacaaagttggagcgtttgacggtttcaagaacaagaagaaggcgggcaagacatacatgagggaaactgaccatgctcactttgctggatcggttaaagcactggaaagatacaagcctgctgcaatgcaaaatatttcaactccactgattaagtctgtcacagtggtgtgggcacgagatggcgtttgggacacggttgggccggaagtcaaagcaaggcatattaaggcactgggccaaaagaatgctgcaagagactggatgttggacacaaaatcagactttgggccgaacgggtgggagatgttgctccctggtgctgagattcagtgcaaagtagttgagggcgaccatttcaccatcatgagagactcaggggtgttgaagcttggcgaggtacttcaaggtaccatcgtcgggccagctcgaagttgagcatccttcgaagctttgtgggaggggcgggatgcgtctcttttgtactacgaaattatctttgttcttttctagatagatctcatctcaaaatatcactcattacctatgaccaaggcgttgtttcgtgcttgatgggcttgtcgtccttcctcgacgttgattggctacggaggaggcctgccaagattgaccggtgcaagtgcattgcaccaaaaataggaggcgggctagccatattgtctaacttccctatccatagtggcgctaactgccttgggaatttacacaacgctgcattaaaacacctattttccagggcaaaaccaacccccatttcgtgccaagctatgcagcaattctttcaacgcagctgccacaaccacatttaaacaacctgtaatgccactattcccgttgccaaaggctccgaggaaaagctcaatttgtaaaggctcaattttcaaagcctcaactgacaaaggctcaattgtcaacctgcgattccattcaaaatagctggttcgagccgcctgggcatgcgcgcctggctcgaaggccttgaatttgaaccaccacttgaactcccaattgcgcacccggtgtaatggctctttgcgctggcaataggaagagctgactgacattaaaaacgactattttcctatacaaaatggcgaattttatgtgcatagcttctcttcggtcaattttgaacctatttgccgaacatagttagcgccactacggataggaaagtttgacaaaatggctagcccgcctcaaaaataggcctctgaagcgatctggtggagcctttgttagcgctctggtggggaagagtgacccgttcactgacatccagtctttcgcagtttcaccctattcactgtgttgacaacgggaccatggcgcgcctaggatgtttcggcggctgctcaaactaccaatctcaatcttggtggcgtctcgtcaaatcggttgactctgtcgcggcaaacggttacacgcgaatactccagcaccgaaacacagaatcgatcagtcgcatgtcactgtgtggatggtgatgatccaaaacaaaccctgcaattcttggtcctgcaaaaatggaatataagtgacggctcccagacaatcgaacatgagttttcattgttctattttgtgatagactcacaaaagctgctccgttttcttttttctctgtttctatttttcctattcagtcaggtgctcctattttctctctctttttcctattgttggaacgggtgaatcaaaggcgttgttcacaagggttattgtttcacttgtctcctttgtggttcatcaactggatataactgtcattttttcttcgactcggaacaaccaccaacatcaccaaacgaacggcttacagcaacgtgtgtctgagacaacgatcttccttgacgtcatttttcccttttcgacaattcacgatacgttatctttatttccacgaaagtatttttcttgacatctatcaaaatggtcgtcttgaagctcgcaaagatgttcctcctgcgtaagtcccccttctcttccatcccttgacatgactttttgctaacgaccttttagccaagggcaccggactcatccgttacatcccctacctcttcatcatccccgtcctcgtcttccacgccctcgccttgaccggctgcgtgagcacctccccggggatccccaacatctatgttgtctccctccgctccgccgagctcgcaaacacaaacaacaccgacctcgacgtccaagtccggatcggctactttggcatgtgcggcatcagcgaagagcacggcaccctctgcggcaccgtctcgggccgctccgtcgaggacctctcctcgactctgttccccgccgcgaccgcatcaaataacaccctcctcaagaacgaaatcaccgatctcatcaccaccgctcaggacctccagactgagatcttcatctccattctcgccggcgctgcagtcctcttcatcgctggccttgtcgcgctctttttcttcaagcaagacaggaagaagaatgccactgagtggtatgagcaaggaaagtggagcaagattgtcaagcgcgggacttatggtgcgcttttcctctcggctgccatgacgtttgcctctgcgcttgccacgagccaaagcgcgggtgcgctccagattacgagcgcggtgatggagaatgcttcggttttgatcaagactgggacgacgattcaggttttccagtggatcgcgtttgggtttgggttttcatttgcggcggtggtgccgtttttggcgaagcctagggaggagagtgggagcggggagtatgttgataaggaggggaatgtggtttgagcgtgcagctttgggggcttagacgtgatgcgggctctgggcgggacttggagcgcgggaggtgtggtggtggtggttgtgtaagatagtggtatacacctaattcttgttcctggatatatttaggataattgatgctgatcataatgattattttgtgttcatatttgttctcatgtgtaaagttatgccaaggttgtgagagaccagccaagtcgataaagtccaatgagcgaccatgtgttgcagggtaaggcagagtgagcggctcacaacggctctcggctgcatatttaaggcacaatggatctttcgcaccgcacgcattcacagtcttctactctttcaagtcatggagggtttgcggaagctaggccatgaggcctcgaacagaatcttgttccatcccaggcctgaagagcatgaatacatcattatcgattcacccaactctgaaccaagacgatgggcaggctatcctctgcaagatgtttttcttacagtccagcatggcccccttactgacccaccttcaccaacaaccacgcccacagtgccagcactttgttttttgtttggaaaagctgaatatcgaccacgaatcggaggatgatttacccaccctccaacattaaacatgtcgcggcatgaatttgaccggctatggaaactatggaatacgcctgcggtgacagtctcaagtggcagggagtcattcaaaaagttgaaaacctaagcaaattgaacccatggtcaccagatgcagagaaggacgagaggacattggataaggcgacgtacggacagcaggcaattggaagggctcttgtcaagattgaagatcatataaagcaaatgaatagccttggggcggtggtgagatcgttggaacacgccgggttttgggtagatcctcacggggatagcgtcactcgcatgaagaaggcggcgcatgagattgaacagcgggtggaacagtggcattttcggtttcaggacctcaaagaacggggaaagaaccagttgaacgtggtgagtcacggtcccgagtgcatcctcaagtgttgctgaagcaatgctgacttgtgtggcagttgtataacataatcaattgatgtgataccgcttcaggcatctccattgctcaatgggcgagaaaagacagtcggtcgatgaagacgattgcggatatgacgatgtggtttttgccagggacgtgcattgcaactctgtttgcacttcctttcctgcctgcacagttggcagcattctgggtttattggatattcgccattcccgtcactctcctgatggtggggattcggtattcgtggttttcaaggacactggttggcaccaaaaagcattttgcaccgacagagaaacaatcaaaccacagtgctgcggtggggatacattagaaacgaggggacgactcaccgagcctggcttccactccgcatccatcaagcgcaggattttcgggaaggatggcgtgcgtgtggtggcaacagagtctgagataccagtttgataagtagatctcaagcaggcaactctcatgcccctgaggacatgttaccacatggacgactttgcttgtcattcttacctgttattagactggatatgtaaatgcatttcaaagagattttcagttttttcgatcattccttctaagttgtcagccagcgaccgttgctcctgccagaccaacttgaaaagtaacatccatcccgtcacctggcaaacagggaaggagtactcatatttcgctacttgtattataaactgcccaccatttggcacgtccaccttttttcaacgccatcgggcacctattcttcaacctgcaacttacaccccgcggtccacccaccgtatcgccgtcgtgtttgacaattacaacgactgtaccatcatggtgacgatcccgtctcggagtcacggcgacgcgctcaaacgtaaactcgacgaccgcaactctgatcgagatgacgacacccagcccagcaaacgctccacatttggtatcatcagggcggcggaggaatcccaactagtcacggaggagtcccaaccagccacgctcgacacacttgccactgaactgctctgtcttatcttccaacagcagacaatcacgttcaatcagaagaaacgtctgtctctggtgtgcaggcggttccgcttgatcctgaggccagtcctttttcgcacgttggcattggggactgatgtggaggggagtggatatgattggatgacataccttcaaaaggagggacagcaccagtcgctacgtatgtttataccgaactgatatagaaatcctgctaattgtagttagctgcgctgtacgtcacaattgggtcctcaaccacatcgatccggtgcaaatcaatgctttcagggcgtggacccgtcgacaaatgcggtacctacctacttctcctcgccatcctctgcaacaaccccgacaggagcgaattaatacgttatccgaacgttttgcagacggcttaccccccgcccccatcgacccgttacaagcctccaagtcctagcccaaatgcctaatttgaagacgctatccatggacggctttgaagatgagttctattatgactcgtttaagtgccggccgttatctgggattacaatggaacactgctggtccgttctctcatcggtccaggtcttgacagtgagtccccatcttgggagtctaatgttcagcgaccaacttcatgcgctcctgataagatgctgccccagtgtccagactcttcgaatcaacattcgcgacaattcgtggggtgtcttgatacgtgggatgagcgatgcttctgggattggatggcattagcactgaagcaggcattcaggttgtccaagctcgtcgacctctagatgtttcaatttggctacttcgcccagctcaattcggacattggaaccaggggggagagaaagataaagaagtgtaggggcggttggactccatatgatatctatggtaagttcgttctctttatagttgcccatatctttcatgtcatgctaatacggctccacttcagaaatccacagatatttcccacatatcactcgcccgtctttttatggcagcattgatctatctatgattgatgtcgatccggacgagtcagacgagtcataccagcaggatgggccatacgagacagatgagccatacaagatcaaggagtttgcccccatgttcaaacgcttcaaaaggcttgaacaactggtgatgacagatgagcctatgatgtcttcttgtacgtttgaagactggtggggaatgaagagggggcggtcgagagtggggccatcattgtgaatggctgtacccacgtctgagcaattgtgataaacaatggctgaaatcagcccgcgcgatctttcaagcctgtggagagcagctgactcggatttctttcgtcaacaaaaataagggaacggagtacatcagagacccggatgacgccaacaagcctgtggtggcgcgtaagtttcacaaccaattgttcacttatcttacatatgctatgtctcgcgggaaggatgacagcccgattcgggtgctgcagtagccatcacataggagatcatgtagactgtaccttggaattggggcttaatacaatagggatgcccttaaaacctcttgctggcttgacatggtactgtgtgcatcacggtatggtatcgcattctgcagaagaacacaacgtggtaaacatcatgtacgatgctgtaagggcaaaaatgtatacattgcaacatggaattacaggctcaaaggacagttaatatattttactagtaattaatagacctttaaagattgtcgaaaggacttaacaacttggcgcaatatttagtattttatccataacgggtctaggtagaagagggtgcaagtccaaaaggtgatgacataacgagtctgtgccaaaccagctgagggaatttactttcccttcattcttggaagtatggcttggattcttgcgccaattcagcaggcatgtttgcagcttctgctgtggttgaaactagctctttggtgccggggatccctagctcaaggcgagacattcacatcatgttgacgatttggttgcctcactggatcccatggcccgatccaagctctacaaaattgccaaaatgatggggcaaatctggaagtattcaaaatgattaggtatcattgaagccaaaatatgggttactactcctcttccttcagcccccctacatgaccctcagcccggtgcttaaacggcctccaccttcttgtgcaactctaaaatctgaccaagagtcagcatcgtaggcgaccgcgtaaacccctcctgaaacggcagcctctcctcttctgtcacttcaagtcagcaagcccaatcatcattttgctgatacgataaaaaagaacataccaaacagcaccttgacccaatcagtccgcgcattcccctgtgttccctccccaaagaccatgagatacagactggtctccaaaatggagaacctgttctgatcctcggtcaggctaaactccgggttggaagcccttgcgctctccactctttcctttctggccgctgcggcaacttggagggggattttctccagtcctcgaaagtgtttaaatactgtttcccacgtctcgggggaaaaggagtggttgtcgccgaaaaagacgtcttttctgctgagggaggcgtcgtgttcgatgactgagggagaggtggggggcatgtgtcagcgttgcttactcatggggtggcaggggggggagctcaccgccgtgtttgttcaggtcgtccaggttgaaggttagccagctgccagtggtggaggtttggagggctttgaggccgacgatgagggttgcgtcgggggcgaggttgacgccctctttggcggcttggatgagcttgaggagggagacgttggacccatctcggggaaggtaggcgtggtttgcgagagcgttgaccatcggacatgggctgcgtttatcggtggcggaaggggcttggaaggcatggtcctgttggtggttggtgtcctggttgggggaagttatgagggactcgatcgtgctgtaggttgcggtgaatatggaggagaaggatgtgatgactttgaaggcgagcgacatttcggctttgggtgatgatgactggggaagtgatggttgcttaggaggccgggaggggttgctgttggtgggggtagttggatattttggtacaaaagatgctggatggatgggctcggaaatgtatcagcaaaaggatcaaaacaggtccgagacttttaaaggagtacgatttgatttaatcctcgcgagctcatgttttgggatctgagtgagatgcacgtgcccttagtcacacacattcagcaccgtgtgtctgaggtgacatctgactgggtcaagtgcatgccaaaattatcctagtctagtgctcacgctgtgtttcacaccgagaaactcatgtgagccaatcttgtgggtggagtttcaaagccaccgaatctttgccgccagctgcaacctggaagctgttcagtctccatgtcaaaaccttattccaacctcccttgccagccagccatcactcattttatgaacagaatagctcagcaagcttggcattaatggcggggacatgacaaccgagacaacggcagtactgcatttagaatgtaccagtcagtctcactgatcaatgtcatgtcgcctcatgtcactcactttctgggctcctggtagactgctcgctgtcccctcatgttccacacactcgatcaaagcatttttcgtcgcccgttgaggattgtcgagtatcaaagccgctatacactgcgaggaattcatcacatcgtgacaagctaattcggagtcgggacactgcgtgtttgacgcttgagcagacaccattgtgctaaagaaaagaattgctaaacaccgcattgtgaggaaatgcatgttgagtggcggatagagtgaccattgagctccaagcagcccaaacttcaaggagaccagcacctgccttctttataattaccccgcaggcttcatgccactgaagattggaccacgtttttttttgcttcaatctactagcgaactgccacccctcaagagaggataatcatcatcaatctacacggcatggaagcaatatgtgctgtcaatacggcaaccaatcagagcctcatgtcgcccgtccattacccccgacaagacatgtatcaacactcctgcagcgcaagatatggttttcgtgcggctaatgtaggatgttgatagattgcgcttcggtaatcaatatcccctctcagttaccgggttcaaagtgacggcatgtatacctgggtcccgggcatcgacaaaggccccatacttccttgacctttcgttttgttccccgattttttctggcctctgggttaaaggttttcgctcaaacatatcataactcaaagcttctacatccaactggcaagaatgcgtgcgtcattctcgttgttgctccccatcctggggttgctatcgacaggcgcccacgcaatcgttcgctttcattgcagtgcgcttacagtacagcgcttggatcctctcgtcaaccctgggatgataccctcaacacacgtccatcaaatagtgggcggcgatgcctttaacgccagcatggatccctcgctcgaccttcccgaactatccacctgcacatcttgtcagtttgccgaggacttttcgaactactggacagccgtgctctacttcaaggccaaaaatggaacatacaagagggtgccacaactggggaacaaccagtttgaaaaggccaagggagggttgaccatctactacatgcaggatgccatctatgacaggaatcagaagagcaatgttcaggccttccaaccagtcagttaatatctcttctgcctgccttggattgtgctaatcaccagtgaaacagggctttcgcatgttcgtcggtgacctcaatgcccggacaatcgaggaagctgcccgcttccgtcaactcacatacgtctgcatggatacttggacctcgcgcgccccagaaacgatggccttcccgacaagaaaatgcccagaaggcatcatgacctccgtccgatttcctacttgctgggatggcaagaatctggactcccccgatcacatggcgcacatgtcttaccctgagtatggaactttcgagagcggtggtccctgcccagcgagccaccctgtgagaatgccgcaggttttctacgaggtggtttgggataccaagattttcaacaatgaggagtggcctgaggatgggagcagcccgtttgtgtggagttttggggacgcgacgggtttcgggacgcatggggattatttgtttgggtggaagggggatgcgttgcagaggatattggatgcgccgtgttggttcaacacgaactgtgcgaaggagagtgtaagtgtcgattggtattgggggtggtgcctgagccccttttgtggagacgaaagagatgctgatgatgtgggaatacagaacagcccgttgcagacgattgagcagatgaatgcgtgtacacagcctagtatggtggatgaggatatcgatgggtgtaagttccttagccattgctgttgattgacactaacgttgaacagggcttgacgaactacctggtggttggaaagcggactatggacatggacatggttcaagagaatgaggtgacggtgtattgaacccggtatatgataaactcgtacgactagattaagaatgtgacgattttgatggttgattcagatcaagcgtacagccatcttttgaaacagtcctggctaatcacaagttcacagcctgtaaagggaacatacattctcgacaccccagaatcccacagctttaaacattcctccgactgcatcccagcctcaggcgcaaagagtcaacacaacattgctgctggcgctgcaaaccctgacctggctgcccgcgggcggcacaccagcaggccaaacaatctcctgcgtgcaagccgggtcagcgctcttgacggtgatcttcttgcccacaaaggcggggttgttgccaaagacgttgctcagatcaaaccagacttggttggcgcccacgtcgagattgtaggcaaagatggtttggggtgtgccgggggtgtagaggccgtcggagtgggaggagatcttgagggcgcggccgcccgtgttggggtctacgtggaaggactcggcgtagtagcctactgtgccggataggccgtaggggccggtgatgttggttccgactgagagggaattagctggttgaaaaacgtggaggagagagggggatggggaataggtaccgggccaaacgtagacgttggaggtgcacttgttgtttacccgagctgagccgatggctgagacggtagctgccaggaaggcaaggggggtgatgaggttggtgaggagcattttggtggttgggttgttgaaatttgagagaatgggatctgagatggtgggaggtgatgatgagatgagaggataagtgggtgctggggctttatagccggcctggcgatcttcccatggcgatgcgttgacttcgtgaacagatgccaactcaatagtttgatgttttcattttcgtgtttccatgctcaagtctactgacaagtgctcagatattccagtcatgtttctattgtgtaagtggtattggcgttcttggtaaccttgtagaatacgagctgtagcggcccatatttccaagccatcgaaggctacccatggcggtcgttgactctcaggtgtgaacagggcgtcaagtgataccaatattccatgttaccaatccctgattccgatccagagtaacacaatagtgcggggtgacaggtgacactgcttctgagccagaaatagaacactttggatactttttgtagagtccttttagtcatgttaacgactgttggcggcgcaacactatttcttaccagcatggcaattgcgaactctgatccagcccaatcttgggccatctcgcacgaatatgcagatgagctcaaggtggtggcagtgccttttgctcaacgcttccaggttttggttgtctccgagagcatgcagttggccatctgaaaagggcaaattttggtctcgggactcaccagaggtggcatcgaactggatacccattctggagtcggtttctccgtcttacagatggctggaggatgatgtgaataaattttgtagaagttagagaacacgaaaacccagttctcgtattatgcaaggccgctggggaatattgcttggcgtgcaggtgctattcttttttccattgaccttcgagtttcggcaagcaacccgacattgtatgggcctttagtacagatttatacatgcataagctttctccagtgcgactactcacaacgccaaatctatgtcaccggcaactgactttagcattgagactcttaagggacaagaagtaagtgccaccacaccattacatccctgtatttggactatctcctgcttgaggctcaaagggaacaggaattggagcaaactctcgacgctcaccatgctaatccccctgtggtcagtcaagctcatgttcacaggcaggagcaacccacttggcaccttccacactcgaccagcagcaccttccttatatataccccacgctcgccatcactctcatcaaacaaacaacttgcacagtaagaaagctctgtggcgcagtggttaaccgcgacgggtggctggctccttctgaagagtcaccaccaaacgtgggtcgagcgtaagtccaaccacctccctctgaagctgcgagttcgaggcccaatactttttgacattttctctttttatcggtcttcaaccaccacacttgcttttttttcgaccacagatcccagcaatggtcgtgacaatgattgagaaacgctgccagacacttcatccttcttgtcggcttgatattttgctattttgtttacatttaccactgtcgtaacctgactggagatcgagatcatccgtgatgggctattctgtacacttccattgcttgtctgccggaggttactgcggggaagatttagagatagattgcttttgaatgtcactctcctgcatcacatcactcccgttggctgggcatttcggatgctttccatcaaccaatttacccaccaaccattccggctcccggatgggtacctggatgcaaagcaattacagtgaaactgtcgtgatatctcaacatcatttgtggtgatgtataattacacccagtagtctcaccttattccccttcactggctcaccttcaccactgacacaaacttggaaactgaccatgcttttcaccaccgcatccgccctcgtagccaccctgtttgcgggtctggtgtctgcccagacccctgttggctttactccagctgtggaagccaagttggaagtcatatacggcacaaaagcgaccatcgaacccggaacaggattcaccaaaacagagactgcacgacaacccaccattggcaccagcgatgtcgcgctgaatggcacatatgtctggcttctcattggtatgtgtccatttcccttgtacatgacaatactgacctctcccagaccttgacgtgtaaggccaacatccttcaccctcccagactcctactgatcccccaacagcccctccaacttccaaaacccctcctccggcccccgccgcaccaacctccacgccctcatcacgggcttcaaattctccgggcagactgtctctgttgccggcgtcagcaacccaatctacaccctgacatcctcctccaccggtcccatcacctacgtcggtccttcgcctccggcagaaaaccccccttacgcccacaaatacgtcagcctgttgtacgagactccagaaggcttcaccgtgacaaggcagcaagtaggacagacattcggcttcaacttgaccacattcgtcgacactgttgggttgacagccgcgccagtgagggcgagctatatcagtgtagctgcataggtgctccaaaacaaccatgtctaacgaatgttgtggggagttgagatcacagaaatgagacaaaatcaaacaccacccaacccagcctcacccatcccgcccccttgaccatccaccccaaaaatcctgttcaactccctctccgcactctgatgcctcgcctccctctcctgactctgctccctcttgtccgcctggtgccacctcttcaaactctccagctcacccgtcaacgcagcctccaccgcaaccgcagtgttctgcagttgctcaatctcagccattcacgtcgtgtgtgagatttctcgctgttctcaggtgagccagttcgaggatctgttcaagttcttttgcagcaactcttctgtctctgtaattttgtagcatttgatctcggcgatcaggggccatatgaccgcagcacgagagccagcttcagggctgtttggcatttcgcttgtggtattttgctggctgcttgtgtatgccccttgctggctacttgtatgtgtctcctgttggctacttgtatatatgtcgcttgctggctacttgtgtttgcatcttcctggctgcaagtgctggcgattaggtctgccatctttgagatcatcactattttattttcctagaaaaatgcaacgagcaagagaaagatgaaggccttttgtagacattcaagtgtgactccttcattcacagtcacggtgtaaaaggtgttggctgtcgtgaatacatatgcacaagaacaaccataatagagtcaacaataaacaagaagaagcgatcaccaaatccacaagccacatattgaagacaacacaacgcgactttgcacaccaattatcaagtcaacataccaaactatcatacaataccaaacatttactcctccttctcctccaccacatcctccaccacacgctccttctcacgagccgtcaaaacgtcctcggcctgtttgaccaaggcctgcatccgctcgtcctcagaaagcacacggaccaactccaccaaatcctcctcctcctccttcgtctcagcagggaccaccgcgccagtctcctcgctcacgagcgcttgctcgtccgcgaccggctgcccggccacgttgatctcgcgctcccccgcgagaccttcctcgtccgagcccttgtcctccaccgcgcgcaagtgctcaatctcttgtccgagcttgaactgcctcttctcagtctttccccagctcggataacgcctatactgggcgtcacccggcaaaattttggacaacttcaaagtcgcccactcggtatccacaccaccgtccatcccgacttggtgcaagttcttcgccagcgcagcagagttggcggcaaacaactcaatctcctcaatccggaaccacgagatgtactggacgcggtcgtcaccgggaagggtctcgaatacagcgatgggggagtggaggccaggggtgtgcttaacactgggggtgttattgcaaccgacgaggatggggctctcgtgtttcttcttctgcctgatatatggttagtgactgttgtagtgtaaagatcagacctacttaccattcgccagggacaacaatgcgagagatattcccatacaggccaaagatttccatgtcgggaccatcctcaaggccataacgacgaaactttatgttctctgtggtggcattaatattgcgatggaccttttcttcctccgtagcctcctgatgctgggcaacaagggcagctttcttctcatcgtacccggggagcaaataatgcctggaattggtgtagacaatgccgtggctcttccacaaaggctgatcctcttcatggacgatggcaaaagcaatgccatctgggttgccctcgccgctgttaatggtctgaaactggtaagacttgggggagtcgggtgagcacttgaagtatctcagcaacaccgaaccctacaaccaactcgttagctgagttacagaaaaggaggtggcgacaagggagctggctggtcactgacgctgacggggccgaaccagttgctaccagcacgatagctgggcgggtcgcggcggaggttaaacccgccagaggcaggtgaggacgaaacattgttgatgtccgaaaggacaccctcggcgttctcgcggatggcggtgagggaggcggcgtatccggcgccgacgtatcggccacggccacggcttccgccacgtccaccaccacggccacgagagccaccgcaaccaccacgagagctgccgccgcgagggccaggggtgtttccgcgagccattgttttttcttcgggtttgggtaagcgaagcggggttttcgagtgtcgtctaccgctggttgcgatcgtctgttgccgaggaagagagaagagtctgggcaacagatggaagagaattgaactgggtcaggttgcaaaagaaagaaaccagcttgggatcttttcctttgcattttgaagacttctgggtcaagctgaaaaggtttttcaagggaaaagctttcggctcgcggtattggccaatggatgacatagaacccacgaggggtagcggaatcagatgtgtcaagaacggggaaggaggaagcgcctgtcagcatgcataggcgccttcccggtgaagacgaagttgaaacaagtgggttggaaggtaaaatctagtcaggagttgacaaaattcagaatccctaatcgacagttgaagtaggccacactatctagctctatctttgtgcctcaaattaggatgaatgaatgcaagggcaattacgtatgcgaggttgtgatttgggagctggatatttacacatgtgaggacttcctatgctacggcgctggcaatttgagtgagaatgtttggtggtttatggcatatatgtgacggcccaaaaagtgaggttattcacagagtactaacaaagccgctgcatctcgcggataggagcctctgttattgaaacacaccttgacacagcaaggcaacctttaagttcacaccaagcaaattgtagaaacctcatctagcatttatcttacactcaggggttgtggcacactgcaagtaaaacctcatcctcgcttcagcaacatcacaacatcctacaagatatccaaggctagatggccgagcggtctaaggcgccacgttaaggtattgatccttgattccaactccaccaagagttccgtggtctcgtaaggggcgtgagttcgaatctcactctagtcattcacttttgctcccgtgtgtggtggagtcaatgttctttttgctgtgagtgaattgacagcatcatccttgccggcataggaggtatccggacaatgtactcacattcaggtgttcacatgctcttcattacagggaattgcaccaacaaaataagctttcaagtggtgaaaggtttgactgaactcttttgcacggcaagcaaccatggatatctcataacaatgctacactgaagcttggagcttcacgtgcctacataaatgaacaaattcgaggcgatgatagcctctaagacgaaggaacttttacagcttcggggactctgactccgaagcgacctgaagaaaatagcaaatgccaccttagaaccgacccctccagccgcggacaccatgttcctagaatactgtcccatcactgtcaatcaagatcggtggctctttggtgtttggcctgctgacttcagcaatctcccggccacccttccagctgccagcttccagaacttgtgcgagactcaactccccgccagccaactccgccttcaagactcggttaacctccaaagccagcatatcgaggaagcccactgtggcacccctccattcgacgataacatcatcgctaggctcaaacatgggcgcaacctcgacggccttggtgcctgtgcgctggcagtattcggcgtagtgttgcagaccccgctcttggtcctcaggcttgagtgtcataacacccatgtcgataaatagcccaccgtttcggtactctggcaacccagtcaggagctcctgaccagcgaactgaatcttcataatgctctgcatgggttgcatgagcgagtacgtaagccattgggtgagcttgtggaagggtaggatgctctcccagggtgcaatgccattcgactggcccgtggtgttggggaaaggagaaaaggtggggctggttggagattgggccggttggggcatagagctgcatggccaagcatcaccgagcgaaacaccattgatagccgtccgtgatggcggccaaattggcgccaaaccatcaatcaagacgttccagagcaccgtaagaggcacaatgatcacgctagatgcttgtgttgacgggtgcgagaggatgtgatctggtcatatggttagcacacgacttgggttcaggaacaaccgcataaaacataccaagcatgttgcctggccggccatcctcgccaaagtactccgtgttgttaagagcctcactcaggcgaatgaggagttgggctctgccctcaagaccagccatctcgttgcccggcgtcgactgaagtccctgagccagcttctcgacggtcagttgtcggaggccctccttatccacttggtacttgtttgctgggctgccagagaacaggccctgtgatatgagttagccaaacgccgcgatttcgtctttggaatcgacataccgtcttgaacatgtccaaggtcgccacagcaatgccctctgatcgtctgtatacccggccattctcgacgctcttgtagctccacttggttccagcgcctgcatcaagcagaacgctcacgaggaaaaggtcaatcatgcgtttgcatttctccgtgttgtccaccatatcctcgggccaagtcgccaaaagatgggcaattctgtcacggccaccaacgccaaaatgctggtatcggccatgtggtgggatagtggtaaaaggggcatcgtaatctctctgtgtttacttgctgttagcttcaagttcaacatggtaagaaagccaccccgcatcgggcgtcaagccagtacagccacaacgtaccttgatgatgttggctacaaaagagaccacatcgggaaacttgcgcatgtcgacatcaaagtgtcgcaggtcgttcttcaaggccttggaccacaagatttggcaacgctcccgcacagcgcttaagctgcgaagatacccggcagggtcgagctgggggtctggtggtctcggcatgtcgactttgggaagtgtgggattcatgcctgttggggaaaaaggggtcaaaggggttcctgggccggcggtgctcgtcgttccagctgatgtgcggttgatgatgcgggagctggtgttgatcggggtgacaatgctcgaggaagccgaggtgagggaggttttagactgggagctggccagcgctggctgatcgtcggcggccgccttcggcgccttgtctcttcttgaaaacaggcccatctcttttgttgtttacgtagccgtcctctaagtggtcggtcgggtcgcgcaatcggccagtgacggggcggtctgctgaacgacctgattcgcgattcgatggaggggctcggggaagctgtgtgctgtgctcgtgacgcagtggggcagagacacgcagcaacctactgacagctgttggtggttgtgattgggtcggagggccgtaatcgtcagcagtgcagaatctcttcaggtcgatgactatcggtgagagagacagcaactgggttctgaagaagcaggagtcggggaggggcgttgttttgttgttcgccgggggggacacagattgcggacctcaatagccttctgcagctagggtcagtaaattctaggcactttcatggcattgcggccaggacccttcccatcccagagctgccccccaacatgtgatggatggccgttgctcagagcctgcgaggggactgggagaccgccgtctgtagcgccagagcccgtgcggtgggctccgtgtgagacccgtcccgccatgctgcagccattttgtggggttgccgatagcgagtgaggggtttgcatccatcaaaaaaccatcaactgcgcgggaaattggagggggaatcttcaaaaccaacaacggaggaaagggaaaatcacccgtaccgaacccgcccagagtgtgattctgaacttttattcctcttggtcctggcttccgggtattgctgcacccgatacctcagccgacaattgctggctccaaagatgtggatttcgctgcaaataatcccagccaaaagaaggtgcctatgctgcagaagaacttttcatcaatcgaacgagcgatgagctgatcgaaaaaaacagctgccgggacgtgcaattgacgagacaagggtgccgagtcaggggagcttgggacaagtcgaccctttttttttttttcttttttttttttttttaccagcgaaaaacagcaataccagagcgttctgctcgccccaaggggacgggtctttaaaggcacattctgcagcaagtgacagcagcatcatgtctctcaacaagcctcatgctgttcctgcaggttgtcacctcgtccgagccctccatcactaccaccaccagcagccatctcgccatggctacccgacccgtgctgccgctagctttcgttagctggcgattagcgacggcgcgaatgatttcaccgtgttcgagaccagcttgtgcccccaccgccgcatccacggcgctggtcaatttggcgatccccctgtcccacccactcaccatccccgggacgtcttcctgttgggctctccgaaaaatggcgctgccacctgcggggccctggaagatcagaccccctgctgccaatgcaaggtaccggcgacgagggtctcccggacgagcacagcgtcaacccgccgacaaatgtcaccatgtcaacggtcagcttcccgctttggctgcatctcccaacggattgcctgcaagataacaagaactggcagagaggcacaggttccaattcctgaaacgggacaatattgacaatattgagccacatctcatttggccagttcggacgtgacggagagaaatcccgtcaagcatgtcttggttcttttcgtggatcgagatagctctcaattgtacttgatggacgaaacctatgcatgcacatcacttctaaccccggcttagactcctgctggtttcactgcttcatgaaagtcgcatgagctgcagcttcgcagctctcgagctggaccagaagcagatcccccaccctcaccctcaccctccagtcaactggcagctccatcaacatacatataccgtccgcagccaaccaccgtacgagataactaataagcaataccaagtccggggcgactcaatacaaagcatccgctggcgccgtctatcacctagttctgtcataactccaaaatcacaaccaagcgggcgaacgaagagaacaatagaacagacccatcagtctggttgctccttgtcgttggccctgggccttttagcttagacgcacaagaaccactgaagaacaatcaaggaagacttcgttgaccagccaagaggggccaaagaaattggaatgggccattcttgttcctcggttgtcaagaaaagcgtacagtcacgagcagactgccgagggtctcacaggacccgattactattaccaacctcaactgccactgctactgatggccagttacttccttggaaccagtgtctcagtctcatcgatatacacaaattgtgtctctcaccctcaaccgtcctctagatttcgacagatcgatatcatgtcaactgcccaactcagacgctctcgtggtctcatcacaccagcggcctcggctaggataactccttgccaatctcctctcgatggaacggacacatcgtccacctcatcaccgtcacagtcacaatcctcccctccacttcttctcaaggaccagctaccaaaaattctttagaccactcagattttccattacaggcctctcgccaagccagcccagtgtttgtcgggtcctcgctaacacactgtcgggcctccaagatccccgccaatgccacgaggtgcaaaatatcgctcgaggctcccggcgttggcgcgtgcctggtgcggagattgggttccacatcgaagatgtgcaaagcctcgtggctctcggcatctcccacacgtggttccgacccacgccgtcgccggggccccggcaccgttccggcaggctgtgaggaatcattagacagtggatgtcgtggtggatgcctccccttcctttgacggtcctctttttatgaaatcccgaacgacgatgtcctttctaatcggtccgcgaacaaatgggctttttctagcgccgtatgtcaacactggtgtccttgatagggcatctttgcttgcccgtttttgcccaaaaaaaggaaggttcaaacaagtgtttgtgttcaaatggcttcactgccccctgaaacctcttttttcccttgtcggcacttgacgaggcaccacgtttttatctcaccccggtacccaatggcatcattgttattagtttgatgacgcagggctcagctgctccacctagattatcagtttgggttttcgctctcgcttccctgttgggcatccatagcctccatagcctccggtctgagggtagagctcgattggttgatgagaggttcacggacttcgttgattgtctcaatccctacgccgatttgttggaacagaagaaggcatcaagtctctccgacgatatcgcccttgacaagattcttcaggcttaccttcatgaggagtagttccccacatttctagatgctcatttcctttcatcgagatcacacaaaataaggacaacatcaacctttctttttttctccctttttcaatagtcagcgggccagaagcaggaaggtcggcatcccttatcaagatccagcagatctgagatgatggacaatcgtactgcttctttacccgggctttgtgatcatcacaatccagaaggctgtagttgccttttcactgcctgtcagtgttgcttatgctgtgacatacggaggctcagtggatgtaccacttccacgttgagctagagagttgagctaaaagaaatgcttgcagctctttcctattgtgaagtcaaaaggcaaggacttgttgatgtccccaaaatgtattttcaaatccgcgttgagctcagtattgttgaatgaactcatgcgtgctgcagcaccccatagcatgcctctgacaggaaccatccaactcacataaagttgtgggatgtgtagagaacaacaaaacatacaacaccagggattccccagtggtcacccacctgagtactagtctggcagtcagtagcttatctaggggagagcggacgggatcccgagttttctactgcttatggttgtatgtgcttttatcaacaagatttgggatctttctagggattgagaagtagaaagacagtgttgttgtctctttcatgaagccatgggttcggtgtggcttgaaggtgccgatacgaaatgcctttcctgcactactttgccttttgggcatctatagcctccggtatgagaggatagttcgattgatggagagcttcaggggcttcgttggtgggaagacatcgatcttgtcccacgataccaaccttgacaacttgctctccacattttcccacatgtcatcgccaataatgttatcaagacctggttgtcaaagcactcaaaatgacctcagatgaagagttcgattgtatcacagatatactgaaatccgattcacctcgggccacagacgtccggtctggcctgatgccttctgaggataggattctgtccttgtaaacataaatgtgagatctggttgtttcctcatcattggacgcagcgctcgacgtccaagtaagctccgtagccctctcggaacttatcttctcgcactccctccacgcccgcagctttatgatgcgagcctcactctttagctctcaaacttgctcatacttgcttttgtgcgactacatcttttctatacctgctttttgtgtaactgtagttttctatgctcaatctgatacacgctcatcatcatcatgacgatttacaaagataaatactccaggaaattccgtgcaagatattctggaagatcatgtctccagcatccaaccaagacactttcttccccaactcaatcgaaaagtccacacctgaaaacacccatcacgatgcacatccagaatctcatctcctcctcctttcttctgctcctttccttccctatctccacgaccgcaacaacaccacgccccccctatcccaaccgcaccctagccggcataaccatgatcgacacccccatcgtccgcgacgcccaagcctacgcccgacgctactgctccgactcaacctacaaccacatcatgcgctcctggctcctcggtctcctccacctctcccacgaccccgccctcgcctccaaaatcgacctcgaagtccacgccctcggcctgatcctccacgacctggcaaccaaccactccctctccgcccccttcgtcacccccaaccggcgcttcgaagttgattctgccattgcagcagcagatttcatccgttcacaccccgacgggaaaaaatggccggggtggcgggttcagagggtgtgggatgggattgcgttgcatgccgagcccgggttggcgttgtataaagaggcggatgtttttgcgatatattggggtaatgaactggaattctcgtgggagaggcccgggggagagaggaagggggtgacggctgaggagagggagagggtgttgcaggagtttcccaggccgacgttggaggagggcgggagggggaatgtgtttgcttttgtggcttggtattgtaaatacaagccggagagcacttatagtgagtttgccttcccttcttgttgtttttcggtaagtgggtgggacaacgtgctaacttctatggcggtagatacttggatgcagccgtttggggagctgctggtgccgggttattcggcggtgggacatcgggttattgatgggagtttggctgctgttgggttgaatatgagtgggattctcaagtgatgtgtgacaacgaacggacacagtggtggctagttggtgattattgttgttgatattatcttgactcttcttattgctctcgtttggtcgtttcatagcacaggtagtcaactaaaattcatgacctcgaccagttttgcttggttcttctcgttgagggaggagagggagcgaggcggagggagcgagaccgatgcaaaggaggagggggtctgctctcacacctggatcaaccgcattgaagccgcctcatcaacgtcacattccagcgagggcttccggagttgaacagtaaagttctctgccacggtctcgtaggaccaactcgagtattcgtcagctctgaagaactcatcctgctctcgcgcgctgattgcaccgcttgacaccgagtcccggtagcctcccccgttcctaccgccttgaacagaagaatgatggtaatcttgagcgtatctgtcatatagaaacaaaagcggcagtaggtcctctcgccaagtcggcagttgtagacgcttcgtccgtatgaccgccacaacccacgccacaaagccaagggtccagactgcggcagggagagcaatccaataccatcggactctaacaaaagtagcgacggtacttgcttggcccttgaccaaaaaggcttctccaatttctgtgccgttggcaacaacacccgagttgcgtatggttttcgtcatggcagcggcaatcccgtccataacgcaggaaaaggtatcggcgttgacgctgccgcattcgttggcggtataattcgcgttgaatatataattcatcatcttggactgcttacaggagccgttcgcgaatccagaacagaattcaatggctgtgtggccgtcgctggttgcagcagagccgggaacgacgtcggtcaccagaaactggggatcaggccatgcccagtctcgctgtaaggactcactcaagccgaaagataggttagcagcgggatcaatgccgcgctcgagaccccatggcggccgcagctggtgggctaaccagtctgtgccattggggggtggctccgtgaatgtgtctagcaaggtctccttatagacaccgttttggacagacgtctcgaagctcaacacacactgttgcagcgagcactcggtggcactgaagttcgagaagtcgagagaaggcctgtaggcactgctgaggacgtatggagggagtaatcggatagcatggtacctcagcccatctttgccgccaacgaaggtgatgttcataaagtcttcgaaggtcgtgaggttgccaacttgacgtagagtggctgagccatcaaataacttggcgctacagtatacccccttcgggatgccttgtcctccaccggcgtctttgcacgtcagattgatcttcgacgtgatatcggtacaccgtgaacagaagcccagcgtagctgtcgggggccaagtgcaattgcctgtgctgcaaaggaattgaggcgagtttgtgtcttgggtcagacctgaggtcagcgccagcatgatgttaagttccagagctgggtcggggtagtttgctgaaaatgttgtctctggtattagcaccgtatcttttgcttgtacccacgatgtgcctccggcgagaacttacttgaatagtcgcggcgcaggccgtgggcgtcatagacgatgctacgactgagcagggcgaccgcgccgtccgccgcgatatcgcccgcctcataccgaacgagattctgtgtgaaaggaccccagaacattccgaacaagagagctagcgacgcagtgataacgacgaatcttttccgctgatatcagcatctgggtatcagtggcagggtgttgagcttgttctcatcaaaggggtaacctactcagcgcccgcagtccagagaagttgggcaacccctatcacacctcctctcgccttctggaaaccgacgagatctgccaaaggccgcggtcgcttcgcaaaccatatccacttgagctgtgcaatggtcgcctggacgccgaagatggttccagcaaaacccacatttccgaggagggatagcacgaagttgagcgtgaccggccagtcgggcgccagctggttatcgtaccaacgtagaagggtggcagtggcccctatacataagagagaggccaggaacccgaggaactcgaagatccacgtctgagagagctttgcccatatcgatttcttgatgctgtggtggtggtacatgtcgtggcgattgcggcgactttctgggtttgtctcctcaatcgtgtgcaaagggccgtatttccgcggatccatttgggtcttctttttgtttctgtgctcttggttccagctagtgaatgaagtaggctgtacaaaagtctgagttttttgggggtttggggcgttgatggactttacttattacagttttttttgcacgggagaaaggggggggatacgaggctctgtaggcgccccccagcttgtctcacaggctggtggctggtggcaaagcataatgcacgagaattatctgccaattgtattagcaatttattccgacgtacaggccgtatctggaaacctacgttgggtttgggggcccaaaggaggctctgcgaaggtgtcgagtttaatatctactggtttgttgaacatggcccatctcccaggggtgaccaatcaagtcgaccaggaaaacacggaaaccactgcaatcgcaacagcaacatgaattaaagatcccattacccatcgccccatcatctatgtataccacatcgcccgcatcccaacaactccccttaccactaccatagctaaagcccagatctagctccctccatacgtataagccacccaccttttcccactccagggtagtcatgtaatgttgtacaagtacatatgtacataaaaatcaaccgcaaaagcaaaataggcttgctccaagccgagcagaacaagtcgaaagcaagataaaagccgatgggaacaatgtaaaaaggacaagacaagatataataatactaccaccaccaacgccaccatttgagtccgctccgctaaggtcaccaacgcaccgcccaaaaagtaaactcctacagcctttttggtgtgtacatgattctccgctggccaaagaaagcaggaaaatagaagcaagacgaatctcgtcaccgaactaggtgatcactactgccccagttctatgagtgaagcagcctcgcctccatggtcgtcctccatgtgaatatccgcatcatggtgggcatgatcgacggcggctttcttatcctcgtcgtcatcctcattgaccagatcaacaaacatgctgtcgtctccatcgccgtctcctcccatgccgatgccaaggggatcgttatcccgaggacctgacgagccagcgttggcagcagccgtaggatcccagattttgggaccaaacaggtccttggcacgttgcttgccggtctctgtccgagacaagatctccataatcctcgttctcccctcatcggtggagagatgctcgttcagttcccggtcatcgaccttgccctcgatcagacgctgctcaaagtgctgcgtggagctgtcactcaacaggaggtggggccctgttgggagaaagtaggaagagtgattcgggtgagaggacgagtccaggccggcgctgtgggatgatgaaggatggtggttgggcggcatcgagagaccaggggttgacggttgagcggacgagttgcgagaatagaatgggtggccaggcgctctgtgactgggacttgcggccaaagcacctccgccggcggcagcagccgcagcagcttcggcattctgggccttgcgcttgaggctgttggccttgcctttcacgctctcgggtaaatcgtctgcatcatccactccgtattgaaggagaagcttcatcagtttggttggcctgggcttgcgtgtgctcttagaagactcaagtaccgggggaggctctggggcaacagggcaccacttgtgaagttcttgtcggaagaagttggtctcgtacgccaggaggatctcggcaccctcaatcttgcgtaggtaaaagcgctgtgtctctgcctcggacgctgtcgagaccacggggctgcaaaagccagcgatgtggttgcggaagttctgggcgttgtcgatgatcttcttcaagacctcttcctcatctggccggaatgggaggctaataatctcctcataccactgaaccaaatcttcaagtttgggacgagcggcatcgcgtggaatcttgacacgccagtcgcaaattggacaagtgtacttgtcatcttccttgaccttgccacgcgcgatcttgagacacttgccgtgataccattcatggcagagctcgcattcaatcatcatgccagcctcggtacggcggcagatgcaaaagacctcccggaatttgggatcgtcccaccgatttgtcttctccctttctgacggacttggctctctcgattggggctcagcggggacacggggcttgtcgtgaacaaagtcgaaacagtccacgttacggtcaagaacgtactccatgtgcgacttgagaatgtgcaaaggagcgttagtcttcccaaacagcttcttgccttttctcatccagtcctcgtgccgcttctgttccttctcgagctcatggatgccagatggcttggcttgaagttcctctatcttcttcatcacgtcagccatctcgccatactttggccgttgtcgatagtcggagctgttgaggcgcctgttcagatcctctatctgtcttgcagcctcgcgctgcttgtgaagcttctgttccacggcagccagggtctccggtgtgacgggcaaggcgttttcacggacttgatccgcaagggcttgcagttggggatagtgaaccacctcggcgttgatgaggtcctgtgccgtcttctcccacaggtgaccggcggcaagcttctccgaaaagtggttcagttggtcgttatatggcgggatttcaaggcgttgaccttcctcaagaagaagacgaacatcgttcagtgtcatgctggttccaatgctatcccgggctctggcattccattgctctcgctccaaaagacgcgacagcttctccacctcgggaatgtccacgttgaagctctgcccctcttcaagaagtttctcgacccgctcaatatcatggtccgtggtaaactcgaggagacggaccgcgtcatgctggaaagtcttgatcgcatcagcgcgttcttgcaattggagtatctccggacagtcgaagccaatcctttcagcttcgtctaggagacggtagatgttggcgacattgcgcatctctcgctctttcgagtcctggtaagaactgccgattgacttccttgtcccgatttgccaggccttctcattcttgcgccggttctgttgcttccgaactgtgtagttggttgcctcctcaacccaagtattgcaccgctcaacaaaggctcggagggttgggagtgaaggcagttcgtatgggatcttctcaccttcgctgagcacagcccgcagagacttcaaagaaggtttggcttcctcgtccaggagtttctcgtacttctcctcccatgcctctgggacattggcgcggtcggccaccttcttgtacgtcgcggccatgagttcgtccgtcttgcggtagtacaagacgtggtccttgccgaggtagcgctcggagtcgctgtaatcgcaacatgggtggctgccagcatgcaggagacacaaaaccttgccggttttctggcaaacaaatctcgacaagtacgtgaaagccttgcaataaaagcacgaggactcttcctcgggaacatcaacgtcctcgatcttgaagactagcgggcattcagggtcgttctctccgttgaagacacagcgatgatgctcaaccgggtgctttgattcgagccgtttggcgatgaactcgtgcttgcctgtgaatacctgtctttggtcgagttcccgttcgtgtattctagccaacgcaggagccagccacttggcggtctggatcgtcagtcccccgttggtgataccttccgccgcggtccacaggagctcatcatgcgagaaacacggttgccgacggaaggcctgcaacctttcgacacctgctagcccatagggctcccagtcgctgggagcaaagttcacggcctcattgaagttgaacccatggttgaagccggcgtggtaggcttgcgggaaggtgatgacgagctgtcctgcgcgttgatcaagcgcatagactcgaacaccggccttcttcagctgatccggggtcaaaagagtaacaagctggaacagaaggtctggctgcgtctcgaaaagctccgggacggcctccctcattgcattctcaaacttctcggcatcatctccggggatcccgtaccaagtcttggtggctccgaagtgctgatagttggccgaatacgcgtaatggtcttcgttatgccaacagaaagtggagaaaatcatgccgacgtaaacccacggaactgtcatgccggagatgtcagacttgatatggcggaagagactttctggatgcaggggtaaaaggttcaggttccagggatcggttgaataggggtcggtggggttcttctcgatggtcggaaatccagagccgtgggttgtgcaatggatatcagcaccatattcgacttccaccgtctcctccaagtcggcaactaggcgccagaactcctgttcgacgtcgtcttcggtaactggtcgatggcagttgaggacagggtcaaagggcatcttcttctcgaagtaaccttgcttaaagttggccgccttctcttggaactgttttagcgagtacagtccaccttcctcgaagccaaactggccgtcgccaacaagacagcgggggcagttccattctgtctccggcttgactttaactggcgggtcaaggcaagcgccatggtaagcatgctcgcaggactcgcaaacgagcaggaagccgtcagtctcgtgacctttgccgcaggtctcgcatcgctaagagggagtcagtgccttgtgtcgacatcgaaacaagggggtacgcggtgcttgacatacctcacccgagcccagagcctcatctcggggtatcctaggagccgatggacgaaagagtgacatgtgcgaacccgctacagtgggaacattacctgcgagtcattcgaggttagcacggaccagtcaccgcgaacagcttccgagtggggcggcgagaaaagaacggagcgaatgaggtacgatggcggacgactgcaggtgggctgggtaacccctcgactgccttcaagcgaccatgtctggcgagcggccagcgtcaaagttgtcggggttgttcaaaagcaaaagggtgaggctgaatatcaaagatgacttacccttcttcagccgtttgctgcttcttcggctgccatcaacatcgtccttgtcacagggcgagtccttctccacatcgtcgcaactaagttgtcgcttgagtccggcagggccaagggatgaaggtcggtattctggtgtgttttttgaggacgcgagcggcgtgctgtactgttttggtgtggagagactcttgttctccgaagccacgttttggggtcggttgatactcgtaaagccggaattgatggcagtgaagcctcccgagttggtcgccgtgaagcctgatgagacctgtggtgtgctagctgcgggcgtgtcggacatttggacgtcttggtcagtctccttgtggccgttcatggtcgcctgtagcgcgtctgtcgcatgtctggccggcgactcggcacggagacttaagggcgtgttgacatttgaccgcttcatcgggctctgggctgggctgggagttagagggccgccatactccagctctagctgctggtagacgccaggtttggcggtccgtaagtattcctcataggggcagagccacttctgatacgagttcttgagtgaggtggacagagacgacattattttgccactgtaccccaggtcacgaccaatctctgcccacttcttcagcttgcacaccttctcgaacccaccgcgggcctcgacggcttttttgagccggtacaggtccagtggtttcttgtcgacgtacggccatctcgtcaagttcgtgttaccttgttgtttgtggaatttctggagcgcgtccaggtaggtgagattcgcacgggtgcctgacgagtcaccctcagtatgacgctccaatgaagaagggggatttagcttgagatggggagccttactgccttcaacagaattgagctcctgtttccgcgttcgaaaatgaaatttctgagtgaggcagtcgtgttagcgggtttacagaggaaaagctatctggcgaagttgtggcaggcaggatctaaaactgggacgaaccagcaaaaaatcgcgataccgcttcacaaggtcacccacctctgtattgatggcgaattcggggttccaagagtctggtggaatgattttgcagagaccgtattctctcgcctcttttgagattttcctgatgtactcgaaaggttctttccattcctcctccgttggctggtacgtcggcgcttcctgcagcccgtgtggcctgttcttcttcttgaggggctccttgcacatggtaggttgcccgcggcgctcaactgacgacaggtcgagaggcgcgctcttcatggagctcagcggcacttgaggttttggcgggtgatagccattcccgttgacctgcgccgcttttgacttggccccgtttgcgatggaagctgaaggcgtggtcatggcgggagaatctttggcatgtgcattggtgctgatcgtggtgatggatccgttcgacacgctggcggaggggaccgataccatgctcgctgtgggttgcttcgatattcgccgtcgtggagcgtgtaaatgccaacgaggccggagggctgtatcgagcgaaaggatgtgaaagtatatttaatcgtggtgggattgtgtattagaactggtgagtcaaacagagtggtagcttcgacgcatcgtatggcgtggatctggagagttgcgacgaaaggttaaactatcacgcgccgacttgcaaggcaagagaggatggcttgagcagggaaggcccgaagcttttgaaggccagcttgattatataaactttctctcacgtaccatggggcgccggaagtgaagttatggtaagaactacacgcgctgttgctctgttttgtcggttcaaaattgcgtgcaacagctgcaatcatgccagcgactctcgcccagcagtggaggctatgatctgtttcaaggtatttcgcaacaggtgctgggagcttgagcagcgtgcgccgggaagaaaggagaggtcgtgtgaaaatcggagagtttccaggttgtggtgaggaattggggccgacacgcggaggcggcaacgaggtgaagggatattgaagatagccggctgtgatgtgaggaaggaaagagctggcggagacgggggacaagcgggtggtggagggaacatggggcatggatggggacgacggcggacgggagacgttccaaaaaggcgaggtagggcggcagctgtcgggacgattttggctggggaggcgcccaggcgcaaaccttcaagtgggtcccttcccacaactggtcatcctgggcctcacttcgactccatgcataactatctacggaatacgtgcctcgagaaaagaatctgcatatggcacgctcttctagaatcatcaccctgcgcaattctcatgccgtacagccagtgcacccaggtgaggttgaggctgaggcatcgaaatctcaaaatgatctcaggtctcctcttgcagctccaccaaaaaacgggaggatcaaacatcccaccaagctgcatgtcccactttgacaagccacaatttgaatgacctgcaaaaattgaatcgcatctcttcgtacaagaagtaagagatcagctgtcatatttccaagcttgatatgctttacaaatcccaatccggggtcctaaactgcagtgataggcgcggcacgcacaaagaaaagctggcacagtgtggctgcgatgcatgcgggcacaatctggtagggtcaggtaaggtcgtacagaccagtctccaacatgggataaaaccacaccaggaaggcggcaactcctgaaatatcggtctgagcgggcacagagaaataaatagcgatatccgagctctctccagcatccaacccacagtttgtgtgccaccacggtactgacagtcatgatcgcatgtggtaggtaggtggtcagcatttcaatggctgaagtgggcacatgaatcatacattatgccccccaatatttggcagtcaaaaacagttagctggaggggctagtaaccgctgataaaaacgagcaaaacgctgcagaatcacaaaagcagtgcaggtacactagactcggaagggtcgcgagccctgatgaagagggcggggtatgcaagtcgacatgctgttggaagcagtcccgtactcggcaatgcgacggtcttatgaagatggacagaaacaagaagaggtgggcagagatctgatatcgcgccggatccaaagcaatcctatcctatggctggccaataaacgaaggcttgacgttcgagcaagaggtgccaagacatctgggggtggcacacgcttgggagacgggggccgtcaggtgccactggatttatgtaatcgtccgctctgtgtgaactcaagtgcatgaacctcttattaaaacatcccgtgttcaaacccattgctatccgacgccaaactgttaattcctactgaagaattcatccgtgtaaatccaagccatatatacaagatccgggtatcatttcattgccaggtgctgccttgccttcatccaaacgccatccccatgtccaacagccatgtaaatagttgtatgctccaacctcttcaaccatcctcttcacgagtttccttcgtcttcgccgtctttttccttggtgccctttttctcttcaccttcagcaaattttccacctccttctgccccctaaccctcaacgtcaactccttcatcatcgtcccccaatgtacctcacccttacacctcggacacctccctcccaccggcaatattgccccctctccacctccctcctcgcttttgagcaaatacctcccccaacacctcaaatgtcccaccccttcacacccctcattcgagcaaacagcatgtagtcccccctcctcagggtcaatctcctccttgcacaccacgcaactcccctgcctctcaaactcaaagatatcctgccccttcgccacatactccttaagcggcgcataatccaacggcaagccatatatcccccaagtcggcacctcctcccctcccccatccccatccaacccctcccctaccacacccaacggttccgaagccgacgccctcgccaccacagccccctcatcctccccaaaatccgtcacaaccggtaaactccccctcaactccctctccaccttcccacaccacctcccccacgcagcatgcacatccctcttaaaaaaatgcaccctcaacggccacctcgcaaaactcggcaccgacaacaacaagtgcaagtttgacagaatcgaactcaaactcttcggcggtctcttcggctgcccattcctcttccgctgggtagaaaacgcaaggcgagattcagagggtatgtgcaatgatgtgtgtgggtttgttagagcccatctacaataccaaaaaaaatcagtatctttacccaagggattacgtggggaaagcttactcaaacttcaaagcggcagttgagctggcaaaaccagagaccaaagcgaccatctcccacggccggagggagtttcgtgatgtgcgcactgctccgcctttgacgaccccgttgtgctggctcaggcggcggggtgggttgggtgttgagccgatgtagagggaggagtggcggacggtggagcggaggatgtagacgcaatagagggcggggatcggtctgggttggggggtcatttttgatggtttgatgatgccgcgcggtatcagtgcattctggtggtaaggatgtgttttgcgccaaactcaatctcaccgggcaggcgtaagaaaggaatgcgaaaatttcatcaacaggcttaagagttcccacccctggataataataataaggcgggatgcagaaatcacagattgtcgttgatggaattgtccgagaagcgcaatctcgaattcctttgtttacctttggtcaccggcagacgtcggtccctggggtgacgtcgctccgtgcagggctgttttgcccctccgaagtgggtctcaaactgacaggggtccaattccccggaatatcagcgccaagagctgttcagacttcaacatggagagaccccttcgccaggcaaaacaaagtacaagataatcaagcaattgcgaaatgctgggtattagctaagtctacataatcctgaaaccttgcatgcgataaaaactccggtgaacaattttcccaacccctctgccgtgcgactacaacagaccctgcttctgaagatcaaggtaaaccttctcaggcatgacattgccctcagcatcctccatctgcacaactgacccgtcatccacatgatgcttcttctcctccctttggatcttttcccagagcctcatggcctctgcaatcgaggtgatgtctcgaaacagataggtattcgtgatgccgagacgcttcaagttcgtgatgtgattcgtctcgttgaagtgcttgtcgaacgcgcgacggcctctgtacacgaagttgccacaaatctcgcagggaaattcctggcccaagccgtggagacggtaaagccagaaggggatcggcttgccgtcccaggccagcggaagtttgagggggttgtagatcttgtcgtcatcgtcgttatcctcctcctcttcgggcgcttgattctgtggggtgtttgacatgttgtaaaagttctccaactcttgggcgcgttcgcgctctgtcataccctgccgtcgctccacgttcacacgagtatcgtccttttcggtactcatggcactagtgagcttcctgaccctaaactctctctcggcaacagcgcgttccctcagacgatgcgccagcgcaacaggcgcatggctgtctccaacagcagctgtttcctcccacttggccaagatctcggcggccttgatatgtttccgcccattcaagtgccccttgtagacgttctcattcttgaactccttctcgcaggcctcacaccacaccgcctcagatgtcgaaaggttgcgcgacatcgcgttcttcttggctgccgctgcttccttttgccaccccggcacctcgtccttctcccatgccgtctcaaactccttctcccagccctcatacaccttgtcaaggttctctagtgggcgagtccgtcgcataaaagactccaagtatgaagcaaggtcacccaggtacttgaagtagtcgtccgtcaacttatctgcccgcttgattccgcccttccctggctgaaagtcgtcaaacacctcgaggtactgcagataggccaagcgcttcgcgtttggcaagttcaggtacgcctcgtggcaggtgtgcaaatcgaaatatcgtccatatgcttcctcgcccgagaacatgctctccacaatgtatggctgatcgggccccttccgcggcttgtaccattgctctgaattctcggcctgctcgctggggtagttcccgtggtgctctttgatcttgttgtattgggcgttgaactctttgaatggatcaccggagctgatgtccaagatttcttttgatcgttcgccggctttatcttcgtagagggataggaggatggccgactgtttttggatctggtcgagcaattgggagacttcatggtcacggttcaagcgatcgcggatctataaagatgttagtatcaagcgtgaggcggtcaacggtgttggatggaggccatcccgacatacctgttttggttcatcgcccatgcgatctgcaattccctgctcgaggcgctccaggtcctcatggatgtatctctgctcctccaacaacattttggtcgtcaatatgtgtctcgctggggttttatgtggtcagatagagcaacactgaaaatggattgcagaatatggaaagctccaaagctcgaagttggttgttatcgatatctttttcggcgccaccaattcgcagccaattcatatgaaagcacggacgcacggacgcacgcgcgcgtccacgcgagcttgtcattttctgccggagtttggccggggaaaaagtttgggtgggtcgcgctgttcttgcgccgccccacagtccaagttgtcgcgccgcctcaactttcagcagcgcattccactggaacttttgtttgagcttgcttcaacccacctcaaccacatacgtccatcaaccatacacagcaccccatctctccccgtttgcgccaactcgaaaatcaagatggctgaaggtggtattgatcgcaaggccgatgagaagctcacgttctcgacctcgaaggaggtcacggtccacccaactttcgagtccatgtcattgaagggtaggatctccaagcttgcgaggctatgttgatcgtcaagactgactactgtttctttacagagagtctccttcgtggtatctatgcctacggctacgagtcgccgtccgccgtccagtccagagctatcgttcagatttgcaaaggtcgcgataccattgcccaagcccaatccggtactggtaaaacggcaactttctccattagtatgctccaagtcatcgataccgctgtgcgcgagacccaggctcttgtcctttcaccaacccgcgaacttgcgacacagattcagagcgttgtcatggcgttgggtgattacatgaacgtgcagtgccatgcctgcattggtggaacaaacgtgggcgaggatattcgcaagctcgactacggccagcacatcgtatccggcacccctggccgtgttgccgacatgatcagacgtcgccacttgcgcacccgccatatcaagatgttggttctggatgaagccgacgaactgctcaaccagggtttccgggagcagatctacgatgtgtaccgctacctgccacccgccactcaggttgtggttgtgtccgctactcttccccacgatgtccttaccatgacgaccaagttcatgaccgatcccgttcgtattctcgtcaagcgtgacgagttgacgctcgaaggcctcaagcaatacttcattgccgtcgaaaaggaggactggaagtttgacaccctgtgcgatctctacgatacccttaccatcactcaagccgtaattttctgcaacacaaggagaaaggtcgactggctgacagacaagatgagggaggccaacttcactgtcagcagtatgcacggtgacatgccacaaaaggagcgtgacagcattatgcaggatttcagacagggcaacagcagagtgttgatctcgaccgatgtgtgggctcgtggtatcgacgttcaacaagtcagtctggtcatcaactacgaccttcccagcaatcgtgagaactacatccaccgcatcggtcgttcgggcagattcgggcgtaagggtgtcgctatcaacttcgtgacgacggaggatgtgcgcatcctccgcgatatcgagtgtgagtattttcaattcccatttgggtcgcagtcagctaactgtgtctagtgtattactccactcagatcgacgaaatgcccatgaacgtggccgacctcattgcttgattatggtcgaggatgggtcggttttccatgtacttctactgtcaacagtagaccatttcggcaagtcagggaagggctggcttgccccgcgacacagggtccggtaaaaaaggttgggaggaaaggggcctcagaatatgaaggtaacgtaccttccctttcgccattattttttccgacggcatggctgactcggccggaatcctaagctatgcgagaatgcaaatttacgtaccattataccacagcgctaccaatagtgtcaaattatttactccggaaaggggtgatgcactgggatattggatgtgtacctgtcaaacctcagtggtcactcttgtgaaaagggatggcggtccattatcaggccaatgtcagcgattacattgtgcatcaagaactctgtgccctcatttctctgctattgcttgcgacccccccttctcagcctccacgatgtccctcccctgcaactctaaactgtcactatccctctgactctggtacattgaaatccacgtctccttatcttgatcgcccaccctccgtgaaggcttcgacccaatagtaggcggattccttcccttttgctccgcgactctgccagcgtcatcaggcccagcttcatcccctggcgtttccaagctgtcgctattggacccggaaaagaacctcgggaacagcttactgaccaacggcttgagcgtcatgcagcacgcgcaggcgatggcggcgttgatctcgatgcaggttaggtaggcgatgctgacgttgtcaaaggtgaagtcggagcgagagtattgctcgatcaagtcccataggcggactgccgatattgtgcagacactacatgcccattagccaaatcacagtgttgggtaaagggggaagtggcgtacaagaaacccaaagcgaaaacaccgtatagcatggccttttgttttggcttcatttgcaggttggcgattatggggagggggaggatgtataaaaggatatcggtgccgatgtggaggcctgtgttccctagccagaaggggcgtgggtggcagtaggcgtttgggtaagttgctttgtcccaaaaggcggggagggggaggcaggcggttagaacggtggtgagggtccagaggccgttggtgaggatgacgatgaggaggatcaggtggacgtagtagcgggcgtggtggtaggttaggaggcggaggtagaggaggaggagggagagtttggttaggaggagggttaggaggtagtagaggattgtgtaccagcctgcctgcaagggggggtgttagtgggtggaactctggggataataggggtagtgggagtgggtatggggttgggagagtgctcacccttgccattgggatgatgaggtcggggttgatatctagtgtgtgttttcctaggccgtaaaccgcttctggatctcgatttggttagcaatcagttagctggggtgtcgaaggggtatgcctacgctcaatcaggcctgcacatgttgctgctgcaaagaccaatgccagtagtataagccagtcttctgctccgaggatgttgtgaagtaagatccctcgagtgtagaaccgcagtcctacaaatgttgctccaataacccatgtgatcacggcacaggcgatgatgttgacctggtaggactcatcggggttggaggtgagatttggaaaggtgacatcgctgggagaagacattcctcaagtctggtctggactctgtttgttgatgatctcaaaacaggtatggttgaacattctcttcctagtatggcgggctgtttgttcttggctgagaaatacttgacatgatgagttcaggttgtgacgagacacggggttggttatgagcaagaagatggctgagctcagcttttggtggtaatcgcctatggcttgtgtcacgtatgtgttgaatatggagatcaatgcttgagcaccatcccggtattggttgttccgtcgatctcagggtgtggttgatcccgctgagctggtggaatgcggggccagccgcgtccgttgcgaagggggaaagagcgaccactcggccacgcctgcccgtcataagcaacaagttcgctcctgctttcatcaaaaacagtcacattgtactatggttggtcaagtgatcagcggtcttcttcaacacgaaaccatcacttggtgggtaatactgcgggttcaactcccaaggtgggcgctctctcttttacaacaaaagattttctggcggcgtagtcccctatgttctcagagtaacgaggccacgctgagggttgtggctctgggggaaatgatcaatctcgtgacttctttttgcagcttttctcctcatcttttcgagttatttcagctaactgtggtttccatgtcctttcactcaagttggttgccggccaagtacttctccagcttcaagcgtgatatggccgactttcgacaccaatgcgaccttacctccgtatcccaattttgatcagcaatcagatgcaacgagtctagcaccctgtagtctatctcttttgaggcgggaaaacaagaagcctttaccgcatgaaagtcgtgatagccgtgcgtgtttggcattgagaatcccagcgatgatccggctcgacaaagcatccgatgacatgcgtgccagcccggcttaggggccagcatcacagataacatcgagtatcctcacataaatcgatattctgcagaaagtaacttatgcataatataaacggccctcgtcctaccgatccatgttcttggtcatccacggatgcttgacaagctcacagccggcatacgatccgccgggctgattttcatcatgcatcccaggaaatcaaggaatagatttatctcattccgccacagtccgcaccaccatttttcgtgctctaatggtggcacacctgtcgatttgacccccttgattcgtccctctccttcgaatatgctattcacggtctcggcatctccgtgagcaagcagttctttaggaaaacatccaaaatggtttataattctcgctaggtggtctttgagcttataatacccgtcaggtggtatctatttagagaataagcgttgggtcgcttctggggtcgacggtggtgtagtatcctactacggaacggtttaggatcggagtgtattttgcctcggttcggttttgtgttggggttgggtggtcgatggggaattcagacttgatgagggatgtatcttggaatttgatcatgatgttgggttgtctgatatctagtagatttttgaggattaaaatttggtgttcatcgattgttaatcactgaactgaggcttaccggtataaatgacactgcttgcgtgggcaaaatcaagtacgagtatgagctggccagcgaacttcctcatcaagggggtgggaatgaggtactcgcggaagtaactagggaaagtggcccaaacacgaggcatatcctcagagtcctacgcggctattatcttggcagttggctcaagtccgcgcttatcttgaccaatgtggtaagataccaaggcgaagatgatatcatcgtcactgataagaatttgaggtttcttcgccgtcagaatttggcaaaaacaaagcccaagcctctgcacagctcagtcctcggcttgaagctgcagcctgcttggtcaaagatgacagatggtagctttcattctttccccatcagcacaacgctggtaggagcccaatcatatgataaggtggcagctggctgttgatatcctcgttcaaaaggcatgtcacgtaccacaacaggataaacatttctcttcaagtcacattggaacaatgttccaccgctgacagaacacagaatcgtggcgatcgaatgatggatcagcggtgaactgcaaattaggaaggtgggatgtgaggaagaggaaagccgcaggtcaaactaactgatctcagcacgctataccgcacacttcaccggctcgaccccattcactcggccaaataatcggtgctccgacttccacatgtccggacaatagatctctccttaggtagaccctttgaggagtctgagtcgcccgtcgtcccctgctgaccatccgggaatgacttccccgcaaagcttatttgcgtagactctgccccgctcccctccgccctgttgatccatgggctcgtatggttgaccatggctgatggctcacatccgtttgaagacaccaaagtagacaacgggaccatggaggtgaaagctcagaatagcaatgggctcgcgccttccgccgacatctgagacagcatcttcgcccattggctcaagagacgggagccggcagtcaactgtcttgtcgaacttggcatcgtcaatcaagcatatgccaaggcgcctggcaagccacaatggcgtgcttggcaggttcaaacttcttttggcagccaagccaattctacatgacgtcctgtcatcaacacttcaacagcattcgcgccgccgtcaaaagtccggcgccgttgatcctccacgccctacatgcagccttctcgccggattttgtgggctccccacatttgacccctcctcatggtcacactcgacccgcccacccattgtgcggtcggcaagtaaggggggaggggggagggggggaggcattcatggttttcgagaattgtgatttcatcaggcaccgcgtgagcggcaacacgcttactctaatcatgtctgacctaccgccctacaaaagaatgcaggtctcttccccggtcccctgagttccagataagacggacaccggtcggtctcagtccgatagtcctgtctttttcccttcccccacatatttctctcttcgcttccctaaccgcacttgacgggaataaaccacatccatggagtcaacgcatcagccagctgatcccatcgccaagggaattcttcctacagcaaagcaaggcgtacgggatttattcaacttcaagcaacgaatcgtcgtcacagatcaccttggtcatacaaggacagaatgggcgcgtccgatccctctcaagaaccccatcagcctgttagcccagttatcagcgcgcgattggctcttcttcatcgtcggcttcgcagcctggacagcagatgcctttgacttccacgctctttcgattcagcaaaagaagctggctgattactatggcacgacaaagaccgaaatatctaccgccatcacgctcacactgctgcttcgatcaataggcgcggcgatgttcggcctcgctggtgacaagtggggacggaaatggcccatggtgttcaacatgattgtattgggtgtgttgcagattgccacaatctacagcagcactttccagcagtttttggctgtcagagccctgtttggcttgttcatgggcggagtgtaggttcttctctcgttgcccaaaactttgaccatgtgctgaccaccgtgtaatagctacggcaatgctatcgccatggccctagagaacagcccagtcgacgcccgcggcctcatgtctggaatcctccagcaaggatactcgctcggatatgtgtgcgctgcttgtgccaatctgggtgttggtggcgcgacggagagctggaagacagtcttttggattgccgccgctatttctatctttgttggcctcgtgcgttgtctcttccccgagtctaggcagttcatcgaagctcgcgctgctggcaaggcgcaggcaaacccctctgcgttctggaaggaaacgcgggtgatgcttgcgcaagagtggaagatgtgcgtttattgcattattctgatgacgtggttcaactgtaagctttatttcccaagtcgttggctgggttggtactgacacatgccctgatagactacagccacacctcccaagacagctacacgacatttatgctgacgcagaaggagctcgagaacgctggagccagtcgggcaagtatcatcatgaaggccggcgcttgcgtgggagggaccatcatcgggtacatctcccagtggttcggccgccgcagaacaatcatcgtcgcgtcgctcatcagcatggcgctcatccctgcgtggattctccccacagatgaaggcggtctttcagcaagcggcttcttcatgcaattctttgtccagggtgcctggggcgtgattcccatccatttgaatgagctctcgccacctgccttccgctcatccttcccaggtatcacctaccagctcggcaatatgatctcctccccatcagcgcagatcgtcaatgctatagccgagagcacgtttgttgtgagtgcttctgggaagatggtggaggcgtatggtcccgtgatgggcatcgcgacggcgattatcgcttttgggatcgcgacgtgggttgcggttgggccggagaagcgcgggagggagttcgagaaggtgttgccggcggggatgaatattatgcaagaggggacaagggcggatgatcttgagtctgggtcggcgagtaatgatgaggggaagggggggactagtgagttggagacggtgccgactaaggggttgagtgagaagtaagggggttggtttgagattgggaggctgatctattggttggaaacataacttttgtgtgattggcgggtcggggacagggggtttcttgtttggatgttggattgactggtttgggttgtgaagtttttctctgggaaggaagttggggagtagacaagtcgtctaccttacagtagcagggcgtcagttacatccgtctttcctgtatcaaggcctgatcgcacccttgataataggcccttttctcaatggaattttttggcttggaaatgcaccacttttggccgaggctttgctgtggagcccactcacttgaagctattcccagtttttgcaacatttaccacacagccaatactgagtgcaatgaggcgaagatagtatcaaaatattcgcaattactaggcttaataaatggctaattttggtattttgctttcaatgttgaacccacccaactttggtcctttggccaaaataaagaggtacgatcagaccctgcagtctctattatttggtagagcgtgcagaccatgggcacgtgcacctccagtacttattctcccgatcaactgaatattggccccttacttgtcttgcacttaacattcattccaacgtcatggaactttttccggaccaatcttttcatacccatccttccactaccatggtgacaacccagtcgcaaacgcgcaaagaggtcgaggcgacagcgcagcctcgaacgcgcaaaaggtagtgaaatgcaagttcgacgatagcagcctcgctgacaaaccatcctccataccactgaacacgctcccagtcgaaatattgcgacttgtttttgagtccggaccactctccttcgacgattacaaaatggtctcactggtttgcaagctctttcatacaattctgaggtcatacatttttcgcacattggtcctgggcgtcgacgaagaaaaacccggccgcgaatggatggttgatcttgcaggaaagaacaaacaactatctcgaggtattacgtaagtctgccataaaactctgaaaagtgccttcagaacctcacaggcaagtagtcggagcattgttgtatagcacgtggagcgattatcgtatttggcgtgtcaagtatcaccctccaaaacagaaaggggaaaaagattggaagccccgtcttgatgctccacctgctgtcgatccttggctggcaatgcgtgtactgagcgacatgcctgaactttcgacactcagggtggacggttatatgtcgaatcccgcgtgggcatacaccttcggctcacggcccatcgttccttttcctggcttgagtcgccacttgccaacgatgccatcagtccagaccttgtcagtctctcaaaactcggacactgctgaattcagcagcgagctgctgaggctcgttcgatcttgccagaacctcaccacgttacgcatcgactgccaatcatatttggaagaaatgaagtaggtaccgttttggccagttataggctcgttcttgaaagaggcttcggcgttggatagcttcgaggctcttgaattgtcccggtttggattcttccaatgtagtaagctgcatgtgaagagatgcaggagcggctggagccctagcgacatcaaaaggtaaggcctaacatatggtctttcaagtgtggaacgaccaaaccaaggtttcttctctttttccagcaaagaactcctggaatcgggaagacaggtatgtgttcaattgtgaaaagtgcggcgacactaacacacaggcccttatcatctattcattccctcttttccgacatctcaaaactatcgatttatggcaacctggatgtgaagtggacatggcatgggccaggggagacacccgaacatatggtgtgggaggaacctgaagagggccaagtccaacatatcgagcaaagagcatgcacagtccaggacttcattccggtgctcaaggaattcaagaacctcaagcagctggtcatcaccgacgagcagatggcaagatctgaagtgatggacctgcctaatgttgagaaaagtatgtttgaattgctgaaacattttcgctgaacatcagaaagctaactcactcgggttcttgcaggagcggctaatgctcatgaggaagtgacccggttctccaaactggtgttgaatatgccagaggtgacgatccgggaggccaacaaccaaagctggtgcggagcttccataacaagtggtttgacacattgactctggcgagggcgtggctgcagggcatggaactagggccaaaatggtggtgggcataaaggaatggtctttggcggttgttgggggtgccttcgtagagacttcgcaaccgcaatgcaaaatgaatccgaggttgccactcaggataggactcttcgaaggagtgttgatgggtctttatacatagttgacaggcatttagagtaactagtaactatgccttgagtattagaacaagatagcgataatttaatcctagtgtttcatcacaagtctctattctctgctcacatgatagctccccatctccaacgttttctacaggataaagccgacaaagactgaatagagaccatttatgtatttcacaccacaacactgagccataacttcaatgccctcttgctatcgcctttgctctgacaaaaccccaaataaatgcttagggcccacggctgggtataggtcacaggtaaaagattgaattgtcggaggaggaagaaaagaaaagaaaaaatgaaatacactgcccacgacgtcctcatatacccagggcggtcaacaagtcaagtcaagtaaagtcgaaggccgacttgacttgacttgccgcccaggtccttgacttgacttgaggtcctcaccggcttgatttgacttgccgacttgtaagccttctagtagtctttccggccccgatttttggtaaaaatacaggggccaacttaatacatttaccactataaacctagctattattaatatgtataaatttaaaaaagactttttcgggccttggcaaaccggtacgttaagcctaccctggatttgatttgacttgcgcaaaagtccggccagcttgacttgccttggcagcttgacttgttgaccaccctgtatatacctcccaaaccctccggacttcccctgcaaagcgtgcgaaatatccaccaaaactgtccgaacctcgtcgtatctccttcaacctcctgcctcccaagtcaatcgcaagccacgtcaaccgccaaacaaccctaacccggatatcatcccataacgataaattcccactatgatgcttcttgcaatggttctccaagcccgactccttcttcacctgttggagcaggagcctcgggtggcgcgggggaagcaaaccaaggaatctctccagggtggaaccgctgccaatcaataaaccccaaccgtgcgggagctcttcccagccatgccatactatcaaccaaatcagatctcttataaaccctcgctctgcaatagggacacgtgttcctcatcctcaaccaagtggtgagacagcccttgtggaaggaatcgtgagagcagattctgatctgtgctccctcctcgccttcctcgacgttctccatgcagataatgcaagacactccttcttcctcggggttgatctctctggtgtccagggcgttggtgattgcttctggaatgtctgacggcgggatgtaatgtcttccggcaaggtacgcatccatctgcatcatgttttccggtatctgctcttgagggatgtcggtagggctggggatcaacccgtcgaggtgatggtcgacgttttgatagaggatgtagtacagcatggcgtgttgccaagtcatgaaatttttgtttccaccgagggccgtgtaaatggttggttgggtcagcccgtactgatgggttggatccctagtgaatggtggagtcgtttgggtatggagcgcttcgatgcggggggagatgaccggtgcatagaaaggcgaggtgagaaatctctctgcgcaatccggggtacttgagccgacgtgttgatcggcgaactttgtcatcagcatgccaagagtcggtccgacacatgatggtcggttgatgacgaagagtcgaagacccatgagagggccggcagtgacaagcatgtgaaagatatcgccggcgcgtgtgcgcttgatgctgatggcaacttgtagcatggaccttgtctctggagggtactgatcgaagccatcgtaatattcctgaatgtggttggggccgtcgctgtcgtcgtcgttgtcctcattgtcatcgtcgtcggcgttgttgtcatcattgtcgtcattgtcatcgtacatgtcaccagatcgcatccaggctctatccgagtcatcttgcgtcgacgcgtttgattgacggtcgagggatggtgggggtactgatatttcctgtagcaaggctgctgcgcgggccagtcgctgttgaaggcgctgaaaggctggcccatatggttgtagtgaaaccgacatggtcttggaatttgggctttgataagtaaggtaccacgcaaggaaatgcggttgatgttgtccaatgttgtttgtgttgtggttgggctcgcttgtaatctgactggatagattcaattgaagactcttagtggggaaaaaaacggaagaggtgagaaaagaataatccaaaggttgcgtccggttttataaggtatgcggaaaagtgaaaagtgataacctttcgattaaaatcttgattttgtgctcaaaaccttccagtacgaggacaccgcaaggtttacgctcaaagctcttactgtttggtggcgtacagcaaatttttaatttttttagagtgtttaacgttcaacaggcgttttaccttgatcaagccaccaatgcaccgaggtttaactcaagtcggcgtttgttttgtggcagagcgacgacttttcccagtgagctgccattcatagtgtggatggccaaccaaacggccgcagacactgtattcttcaaggttctttcaaccttcaaccttgtatgagtgcaaacatccaatcctacccttaacgcaacaaaactgctccattttggcactttaagcattcgacaatttgtcccttacgatgtgcttgcgggagactgccacatgaccccgcacatctgcaactctttatttaccccaattcaggggctcaggggcttcattgttagtggggtcaaacgtccttggcaactggcaaccacgagaagggcctttgagatctgtaaaaacaggggaaaaggtgagatttgtgctggaaagacgataagtacatgattctaactagatacgccgatgttgaatcgaccacgacaccattttcagtatctatgtactggtagtagacattagaacaggtaaaccaaaaatcggagtgtaaatgataaaaaaatgcatgatgagcaacacaagaagaacaaattggaattgtttgatcatcgatgacatgctcagtaatgttgagattctgagcagcgacctgatgcataagagcgagcagcaatgccagcacaactggacacatctagacctggttaccgttttcggtcatgtcttggtcaatgccacgagcgttggatgtccagccaaagtcggcgccatatccggggaagtgctgaagactattccacggttcagaaacgggggggtagacactgtgagccggctgggaagtaagtcgagctgagcgtctaactgggctggcacgggagctcatgatgaaggaactaccaccatttgtgggtggctcgtcgggaaaagcatagatgcatgctgaggttggaggtagtgagccatcctcctcggccgttgtgaagtcctcggagcgcgcaggagtgttgtcatcagcggctctaggtgcaagtttccgatacctgtcgttggcgaggctgatggcctgttgagtcccttgcgcgcctgtgttgagatgcctggccttttgtttcccgtccttcttccgtttcggagctccagtcacatgggttactgtgtttcgatttgtaaggtatgcggactgaatgtttcttatggcagtgtcggtgcctaggttagggggtccgaagtggccggcaagctgattcatcatatccgtcacctcgtttgactcgaacacctggcaaggttcgtagtctgaatgaaagagacattagcatggacaacaaaaagcagaacgtagtactacctaccagaactgggaatgttggtatcgtcgttgaaaagaaagacccacagcctcggccattcgtgtatcttcgtgcgaccttttctgtccctgagttggtctaccacatactgattgataccgttctcaaagccctggcgacgatgacttggtagttcagatggagccagaacgtgctccttcttgatatgttccctgcacaatcctgtcagtgaaaacttgcaacaaaaacagaaaagcgtaacgtacttgacatcggtgagatcgcggaagctctttgtgcatttgggatactcgtggtagttgaatttccttttatcccatttacgataaggacaagccatcggacggtttgatggcggcgtttctttcccgtcgctgcgacgccgatcgtcgccgtcaccttcttcgtcctcttcttggtcatcatcggctgtagagttacgcttgcgtttcattctcttcgtggctcgtgttgtgatggccgacttggttatcgagttcgagggctgattatcgtgttctgtacgtgaggagtctacggtgccacccgcgtcgcctagctgatctgtcgtgaagcatgccttctcatgaacggccaaagcaattgagagctcaatatcggatcgatggcctggcgggtgtgaagagtcagggttgagagttaacgcggaaatcttcgatgacaggcatgtcagatagttttgattggcgtccacgggctttgaatcgtgactcttggtctttgcatatgatggcgtttctgggagtcgacgaggaatactatccttccagtccccggccaaagcgactgagaaatcaagccgcttgatgttgtcgttcgtgctagtatcggggcatgaatgtcggcagttctgagtaatggaaggcgcgtcatggcagcttgtaggattttgagaaggttctggtgatcttcgatgtgaaggtgtctggtcaactggtagtgagaccatattaggccaggatggcatcgccgaagagccaaaaacacgttcgagcgggaatgactggcttaatgtcgaaactgtggtagatgggcgcaaatctcagggcgtaaatatcggggctgataagtggttttggcgtacaagcaatggattgatggagggcagagaatgatgtagaaataggaagaacaagaaagacgtccgctctctcgagctgtcactacgggggatgactgccatccttcttggcccccagcctcaacacaatgtacgccggttgaggctctgtcctttgccactactccacaggcgccagtgtctctgagacaatacattaatacgcatggttaaggatgaggctggtttctcggtggcttccgggaacttgattggtttattgaacatgaaatgaggtcttgacgcatcgcggagggccgatgtaatctcttcgctgtaaggcggccgacagagcggcttggcttcccgtcaaggtgtgcacgcagataccaacatcctcaagcccaggtgttagattcaccgacattctcagcgtgaatgtcagctctgttgaccttggtgcagcatgagtcgtcattgactggtgtgatctggagcagtggatatcaaggccagcgacgtgtctgttcctgggtagtatgctgtgcagctgccaccggcacctgcaggaatcccggtcaactgcgcctagtttgatagcagaagccggaccaagaccgctagccacccgatttcctaccggcttggtatcggagtgcatcaggagcttgaagtagcatgctgtgtcacgacgaatataatgacaagcgagatgaatatgcatatctgacagctcgctgcagagaaaacagtgcacagaacacgggtgcgaaggctattcgctcgagtcttctggctggttgttagggaggttatgacaacgcttatccggaggtggttggtttggcattggaagaacctggagtggtgcgagttacggtagtccaagcctcatccgctagctcactgaccctacgccctacgcgttaagaagcgtagttctttgaacatgttgcaaaacggtagatggcgtgcaggaaccgcacgtgtaaattattgttaatttttctcgatctggcttgggtggtgtttcgcaggctggtcatgcagatctggattcccaagtatcgataaaattatggagcttgggtccgtgcatactcggtacctgccagcaccatcacgtaccacctgcaggcttccaactgccaaaaattcgtgctcggaccacatcaaccacccaccgagagcagccccaccttgcttagcgcgccttcaccgcggccgcttttgctcaccacagcgacccagagccaccgcaagctgcaaccgcaagacttccaacggcggcagatcaccacattcaaacatcaccgcgtcgcaaacatggctgcaaacgattccaatccaaaattgctctggaatccagaaaatgtcagagacgtggccgattcaataggaatttcccttggtgacgaaccgctgcgagtgctggcccaggatgtcgaataccggatcggccaggtcatcatcgagtcgcttcgcttcatgagggcctccaatcgcaccaccctgactgtccaagatgtctccaatgccatgcgcgtactacaagtcgaaccattgtacggttatgaatcaacccgacccttgcgctatggagaggcgagcctgggacccggccagccgctgttctacatcgaagacgaggaggtggatttcgagaagctgattaacgcgccgctaccgaaggtccctcgggatacaagtttcacctgttagtatcgtatgcgacttgtgtgattcacaagaaaactgacctttgtttgctttagcacactggcttgccctcgaaggcgtccaaccctcaatcccccagaacccaaccaccgccgaaacatcctcaaaggacctcctaccaaagggcccaggcgccaacccggccctggctgccctcgccggcaatgacaatgtctccttccgaccagccgttaagcacgtcatcagcaaagagcttatcctctacttcgacaagatccaatccgccatcctcgacgatgaccctgatgaagaaaagacccgattgcgcatggccgccctggagtccgtccgctccgacccaggcctccaccagctcctcccctactttgtcaacttcattgcgaatcaagtcacgctccgcctcgatgatctctttgtcctgcgccaaatgatggaactcaccgaagccatcatccaaaaccccaacttcttcctcgacccttacgccagctccctcgccgccccgatcctcacctgcctcatgtccaacaaactaggcggtatcgaagacggaaccgacacagtcaaagatcagtacagcctccgcgagttagccgccagtctccttggtgttcttgcaaccaagtataacaagagcaaccgccaactccgccccaagctcaccaggacatgcctcaagtactttatggaacccaaccgtcccccggccgtgctgttcggcgccataagtggggtcgctgccgccggagggccggaagcagtccggatccttatgctccccaacgtcaagagcttcgaccaggccgtcctccaacccctccacgacaagggtgaggcgcataaactcgagtacgagatgttggtaggcggtatcatgaaggcgatcaagggtgctgtcgggggtgacgtcaagcctaatgccaatggcgtcaacggcgtggatctcgagcgggaagcgcagcagattgtcgatttcctgggggagaccatcgggagaagggtgctcgcgctggcggaccacacgctcaacaaggcgatcttggaggtacggcacttggagtaggaggggttgtttggttggctttgactccatcatgatcatcataatcatcatcacattcgggaaggggttcttctctggcttggacagcgcggcgtttggtgtttatggagatttcggcaaaaaggagaaaggttgctaaaccgttgatatttgattctgcgggtttgtttttggggtggtcaaaaagagccgattcacaacgaatctttatatccatgaagaaggggccaacattgaatcatcttcaagccctggtttctgcaaaaataacgatcaatgcaagtataaataatctttgcataataaacaaacagcgacaaaaaacatgctctgttgtggctatacaaatggtgtcctggcttcggccgtctataacctttccccctctccttgccagtgttacacattctgcaatttgactcccccgctctgccttctcctactcacacactcaccccctatcctacccttggtattttcctggtctcttcccccacctcactgcccccccagttttcatgatttgacctcccttccaaatagaacttttgcccgctattcacacacattttaaaggaagaaagccaagtacagcccgctgaccaacgaagcgccccagatgtaccacccccccttgacaatctgctgcctcttcatgaacatgcccaggtcgagggcgaggtggcggacgccgttgaaggcgtggaaggcaaaaggccaggcgacgaggaacttgacgccggacttgacggcaaaggggagggcaccgaacgcggagacgagggaggcggactcgaggtgccagccgaggaggggagcggcgaggtaggcggcgccgaagacgtagaggccgcccgagaggccggagccggtgaagcgctgccagatggagccgccgaagaaggtctgctgcttgtcgtagatatcgaggtggggggagacggggcggttgaggcgttgggcgtctaggatggagcgggcttcggtggcggagattttctgggtggtggcttgtctggattccgggggggttaggttggttggttcgtatcatcgtgggttggagggggaggggaagtacctcgtttgcatttgggacatggcagccttggcaaaggtggatgtgaagacggcattggggttggcggcgactgtgaaggttgcggagagatgatgttagcgatcggtttggtggtgacgacgtcctttcatgtccatgcgatatcttctcctcccaagttcccggttgtccgtgtatatcgatccaaaaaagaaaacgctttgtccagcaggatagtgggctgcgtacctctgcggagagccgtcgtgcctgtccgttgggcaatcattttgtgtggtttgtgtgtgtgaaagtgaactggcggcagaagcaggtaccccaatgtgttttgagcagagagaaggtcaatgatgctgtcgcgaagttggcaattgagaagcagtcgggaatccgacgcctcgaacccggcaggtgtcggcacctcggcttgatgcgaccaatcacaaagcagatgattcgaatgcgggatgaggtggaccgtgcagctctcttttggcttttttgaaagggagcacgtgacgctccaacgcccggccccactttgcgacatcaaaatgcaaatctgcgcgccaaaattttacttgccttttcctctttttcttcttcagatagtatgggagctcagccacagcgtcactgttttgcgagtcggtgatgcaatatagtggtaacctcagacgctttggtgtctacgggtgcccagagaagaaagagatccgtcgttaatctcagtctccagtttcctcagtctggttgctgtttcaaaaagagatctacatgtcattcttttgtttgtgtgtttacgtttgtgttcggcttggcgcttttggtcatcgcttggcagtcgctgtcatgtcgccaatgtgtggagtggtgggtacaccatggtcacctcaacgcttggctctaatacttgacgggccgtctttgttcgtttgatagaacgtgttcgctgcatacttccaattttatttggcacctggatgataatcatcaagtatggatgaagtcttgaatgagccaagcttttgagattgatatctgctgagcatgaacatcgctttggcagagacaacccagcttctgcaagcccaacgagtagtttttgtggaggctctcgcatcaagaccgtcacgacaacatttgcattcatcaacatattgaattacattgcttcaatcaacatgagcaatgactactgattcatctctttcacaaatcagaggtcagagtaaaacgacggcctctgtcctattaaaagtctgcacatccatacagttgaaccctcccattcctgatcctgagtgtcgaagatcgtcagcgccttggcctttgacatgcccggcaatcaatctattctgctgatgcataggaccaagctaagcttaacccccttctccttcttctgattctttggtcgaaccaaaagttaaacgacgtccttgggcacgggccaaagcaaggggtatatcttcctccacgctcagtaacaaggccaccccataaccctgaatattgtcagcgccctgatcttcagttttcacaatgatacgcccgtcaattagtcagattcagctgatccagaggtccagcctgtcactgaacttgacctacttctccttcttgtgattcgttgctcgacctccatctcaagaatgagcggctcgagacccgatttggcgtgcaatagctcaagagcacccggctggtcgatgtatgcgcttaaaatgatccgtagacacggcttcttgaccgggggggtggggatatcgatcctggtgatagttgggaagtgatccaggtatagcgtatccaaagatggattgatatatgcctttctgcatctctcgccggactcattggtggtatggttgacatatcttgaccagacattacactcatagtagtgcctcaatgtctcctgtcgggtttcgctgttgatacgcagggttacaggcagctcggggtagtcacggattctgccaacgccagggctagaaattgtgatggtttttggctcccatgtgtggcggtaaatcatgaaccgaagttcgagtggaagtgtatgaagaggcgtgaatgtgatcgaagttgaagggtccgctgccgtactgtctcctgcttctggagaaccatttgttgtgttgcccgtggtgtcgtcaggtggggcactcatcttgggcgagggtaccaggggggaataggtgttgataagggcttgagaagacaggaagtattaaagcgagagtgcacccatgttggcagtgcagtttgagactaggtcacatctgaagatgacaccgatatgtttgaaagtttgattctcgagtcacagcccggctgttgatgtagttggtaggtttggatatgctgataaaaagccaagaaaacgagatagcgtgaagcctagtttctcaaaatcgccgaaaatcgcgaaacaggagcacgccgcaagaacatcagaaacggttgagaaaccgatgctctgggttgaggtggatgagttgacgttggaagaagctactggggtcgccgttgacaattttgattggttagttcaacgtcgaatcgcgtgcgcaccgacacccgcccgatatccgagcccggcgctgggaatggtggagaccaatgacatgaccgccatcaggtctcacgagcacgcaatcgactaaggatgcatggcagacagatgactctgaagaggcttcagatcacgacttccgaagatggcgatatctcagtattgtagacccaatatattgggctatctgcctttcgaacctggcgcttttcttctacctctcccactcagcgcgtttttggctttgaagcggtttgtgcaccggaccctgcgttaatcgttacgtcgacaccggttcaccaaccttgcagtagcgccgcctctctgcacaacacattagggttccttcgtccgaggaactcgattctcactcagagccttccaccatggcggacgccacaagttacaagaagccgcccgtcgacaacgacacgtattccgaccatgtcgacagtgaagccgccagcgaggtctacgatgagaacggttctctactcagcggaaagacggggagcagccttggatatggagtcccagattcgagaaaaattggtgtcacaggtgctgtcttcttgatcctcaacaagatgatcggcaccggcatattctccacaccgtccagtattttcgcttcgaccggttcggttggcatcagtattctcttgtgggcagtcggtgagttgagcggttcctagtgactcagctcatgtttgctaacaaagcacagcgggacttctcactctgtccggtctcagtgtctacctcgaatttggccttgctattccacgctctggaggcgagaagaactacctggaacgtgtattccggaaaccgccatttctcatcacaagcgtctttgctgtccagatgatcttgctcgggttttctgctggcaactctcttgcattcggtcgatatgtgttgctagcatgcggtcaccctatgcctgatggcttggttccacggataatcgccgtcgcctgtatgacattcgtcgtgctcctccacgcaatcaaacccacatggggtctgcgacttaccaacgcactcggggtcttcaaggtgctggttttgttgctcattgtcttcgctggatttgcggcattggcaggataccgcttgatcccggaccctcacaatttcgacaacttttgggccatcgaaaagggggatgggtatggcggtggcggggcctatgcctatgctaccgctctcctgcaggttgtttacagctacaaggggtgggaaaacgccaattatgtcatgggagaactcaagaatccccagagaacactgaaaattgcggcgcctctcgcggtcattggcgttaccgtcctgtatgtgttggcgaatgtggcttattttgcggctattccgaaggccgagctggcaaagtccgaggttattgttgctggcctcttcttccgcaacatgtttggagagagcgtcgccgccaggagcttgccggctttcgtcgccctaagcaatatcgggaatgttctcgccgtcagcttcgcccactcccgtgtcaaccaggagttggcaaaggagggaatcctaccatggagcaacttttgggcttctaccaagcccttccggacccctgctgcagcggtatgttcttttccagtctgactattctgactgataccactcgaactttactgaccacctgtacagctgtttttgcattggatcgtcaccgttattgtgctcgttgcaccccctcccggcccggcctacaacttcattgtcaatctgtacacatacccaggagcatggatcaacaccatggttgctggtgggcttatttacctgcagttcaagaagtccgagaactggtcgtcgccgtggcgcacgtggcttccggtcaccattgtgtacctcctactcaacattttcctcgccatcacacccttcatcccaccaaacagcgactggaacgccgatggctatccatactacgcattccctctcgtgggaattgccattttgctgctgggcgtggtgtattgggcggtgtggaccaagcttttaccaaagcttggtggctacagtattgtggcggagacggttattgatgagacgggcgaagaagtgatgagatatcacaaggttccaacaacaggtcccagggaggcgacggcgcaaccgctcctgtgggacggaaatgccagtgtccatagcggttatggttcgctgtgacgatggcgtgaggacatgagcgtttacgaattatgaatgagacgatgaatgggacatgacataaggactgtctttgcatatatatggcgcagggtttactttcaacggcatagcattatattattggctgggtacggactttcaacatcgtttgggcatgggacgggataacgcgatagaactattggaagacaacaaagatttcaactttctttctctgactggcgactctgcgcgtgctctgtgtgttgacgagagggacattcttcagcgatagcgccccgacaccccgtcattgcgtggaatagcgtgtcgcattccatccttctatcaccatcaagttccaccataatccataattaatcctgatggagttggcactttccaggtaagcacctccttcccgtctgcatcacacacactcaatttattttcatctttctggccaagcagtcaggccgcattgcagcatggcagtgctagattgcaccgcatccatcatcatcattcctcaatggtcatcacgattcatcccgccttggaggaggcatgaaacatggtgagccgccccagcaaccgaacactactcatagtcaagcatacaaatggacggcgatgcaactcatcatccatgccagattggtcgagtggtcagcagtggcgcatctttcggtacgggattccgagatctgcccaagcatcctggtttgcgtggctgtccaaaagcagaaaagcaccgagcgtcaagccgtgtgtgtgaagatgtaaatcgcagactaaccgtcccgtggacttgaatctcggttgtggcttcggcatatcacgatccgttaccgcgatggtcgaccttccttctagacatgtaagtaatcaagtcacacggtacaatacgtcatttgacggccggctgtcccgtgtcacgactgcctggcttcataatatctcactgccttttcctgccatgaactagggaagcgccccagtccacttcggccattcttcccgccgttgatattgcgcgcgggtctccttttatattaattcgaccacttcccaccagtcgttggtgcaggatccgctcatcatgtgtgggttcagtcacaaaagagcgcaacaacaagctccgtcttgacaaggacccaaccccatattagccggcaaatcgcaaagcgagcggcaacaccacacaaccactgacagtcgagcgggaacccagcagcgggcctagactggaaaacctggggcaatcacaaatgaactggagaatctgggggaatgtcggcttgtgtatcccacccgccccgccatgcaacggcagagcaagccgcaaccatgtaaatggaacgtccctaaacggcaaccgatgtagccttcccacgactatctctaccttttaaagactcaggctcatcttccacaccctcactcttctcttttcctgtctcatcacatttcttgctcttgtgccaccagccagccaaaaccaaattcaaaatgttgacctccctcatcagcaccctcggcctcctcgccgccggcgtcaacgcccacggtgccgtcaccagctacatcatcgacggcaagacctaccccggctaccagggcttctccccggccaacagcaagaatgtgatccagcgccaatggcccgactacaaccccatcacctcttgcagcgcctcccagctccgctgcaacggcggcacctcggccaccgagtccgcccctgtccagcccggctccaaggtcagcgccgtctggcagcagtggacccactcccagggccccgtcatcgtctggatgtacaagtgcccgggcgccttcagctcctgcgacgggtctggctccggctggttcaagattgatgagggtggcttcaaggctagcaacggcgtgttcctcgactcggagaacccgtctgggtgggagattgccaagcttgtcggtggcaacaaacagtggactagcactattccttcggggcttgctcctggaaactatctcattcgccacgagttgattgcccttcaccaggccaatgctcctcagttctaccccgagtgcgctcagctcgtggttggcgggtctggctcggctcagccggatagctcttacaaggctgctattcctgggtactgcaaggatggcgactctaacattagggtaagttgttgtctgcgagggaagttgaaatgggataatggctgacatgagtatgataggtccccatcaacaaccgcaacattccccagacctatgttgtccccggccctcccgtgtggcgcggtgcctccaagaaggctcgtgacttctctgcttaagtggtttgatgaaagtccacgggatgaggatgattagtggaagacaattttgggtacatgccttggtttcctagctttgacttgagccatggtagcatttcgcccgctttgattcatgtcaatcaacttttgtatatagctcttcgccaattgacacaatgtcttcactggttacagactgttcacgtttgatttctttggtgaaagggacaatcaacaagaatcccctttgcttttcttctgatctcgcgactatccaaaactgtcaaccatcacctgattccttctgaagttgcctgacttgttccatcagcacatcatttattgataggtggatagtttacatcgatggaaacaataaaagtttcccatggttgaaaggcgggttagatgccagcatctaaccgtctgatttgacaggaccatgactgatcaccatcgttccctgtgtcctcttccttgctcttgtcctcttgatactcgtcctttgtggcatcttggtagctgtgaacttcacagattcttctctcaacactttcctcgtcatcgtcgtcgtcattatcattatctaccccggatgcagtcgattcattgtttccctcatcttcgggcactacatccaattcatgcgtgggataccggtgtatgcgccagttgagtgcggagtgatggcactgaagcaaatgcaatagtctttgcaagtatagcacgcgtagtacgtcccaactaccgtctgagttgcacaaatagttagtatgtgtgtccttgtagatagtccatgcagaaccttaccagcaaacaggcttcacagcgcagcaaggtgcccttgccgccaatgaatctcatcctttctcggcaaaccattctgtcgtatttgatgctggtgatccaccactggcgttcgctgcgccccatggattgaagttcatcctctgacggcgtggcaagactgacaatatcttcgctgtggccgtagctgaagacttgagcgagttggtaagctgtccaggagcgaaaggctcctttgccttccaccaagcggcttgcaccgcaccgaagaagttctcggacaatgtcggccaattgggtagtttctgctccccaattatcatcttggcgcatcgcacaaagtaggggggtccatccatcgtggtcgactagattgacgagatctggattgtggttcaggatgtatttgactacatccaaatgtccacccaacacggccatgtgcagcatgtttgcgacccaaaaagtctttggtattgaggctggctcccgcttgaataagacattcgatataggggacgccacgatatgcggtgaagtgaattggatgacggcccatgccgtcgcgaatggtgacttcctggcccagtttgatcagcttcttgataatatccagctctgcacctcccaagattgccgcgctcagggtgctgccgatccagatggctccgcgctgtagtgaaaactcctctctgcccgtctttagagaaaaccggtcgctgttgacagaataacgcaagatgggctgcttttggccatcatcgtcccctcgttgaagggcaggtggcttggaaagttgttcccggtttcaagttgtacctgttagttgatactagatccatactcaaccaagagctttacccattcaagacccagacccggctcacggcaggcaatgtggagggaagagccgcgaagacccgtgcctccctcattgacatcagcaccttcctcaagaatcaggtatcttgcaacctccagacttttgacccaaagggcctgggagagaggggtgatgccgtcctcggccacggcattcatgggatacccgcgcttaatgacgagcttgaccatctcgaccgtggttctctcccgaatccagtgaagtggcgtgttctcagaatcagtctcgtcatcaaccttcaagttgtagagaaacagcttcttcaagaactccgtgtttggggtgtgtggacgcagaaagcaaccaagggcggcattatctcgctcccaccatacaaggtcggatctgctcccgcatccaacagatcctagaagaggtcttcgtgaccatctctgatagcaagccacaacatcgtgcttctgctccataatatgttcacatcctgtttgtgcttgagaagctctctggcagcatcaagggcagaggagcgagtgaccggctcaatatcttcagactgcagatacttgaagtcgttctcttgaaaatggcggaaacatctatgtttgaccgcttgtcagtgttgacagctgtatcgaattgccgcaccatgtgaattttgcttcctgagcgatgttaccgttaacatgacttcaaaatcacatggtgctttatgtacctgagcaagtaagcagtcaaccgcttgaccggtacctcttctagggttatcaaaaagaaaagtgttcccgttcatctagaaattgggggcagaattgactgacacaaacagaagagtttccagaagagcggtcaatgccgttcatagagaaaaaccgggcagtgcctggctccatgacaaacaactttataaccccccctcccccaccactcacaaagtcccattaaaagctctgaaaaaccccagcggaaacccatccgccatagcctgaaaccccgccacgttaggatgcaaatgatcccccccatcaaactgcctcgccagctgcgcccgattccccggatccccaataatctttgcaaaatccaccgtcgcgtcaaacgtcccgctgttcaaaatccactcattcaccttcaccctcgtctgctccctcgtcgggttgctatagctctgcccgctccccgtaaactgagtaatcgtcccccctatcgtcttgatccccgctgctttgcactccctaacaatctgctgaaacgcgctttgcaaccttgtcgcaatggagttttgagaaccagagtcggtgccaccgccgccgatgtcattcaccccaatgaagatcatgacatatttcacgcccgctacttgcaaagcgtcgcgtttgtaccgggtgaggagggtcggtcccagaccgccagagagaacggtgttaccccccgcagcctggttgttgacgccgatgtggttgattccctctttctgcatacgtgcgatgagcaggtcaggccagcggttgttcccgtcgtcggtgctgcctctcccgtcggtgatgctatcccccaggatcacaaacgcggagtgatcctttggcttccaggcttcgactgcggacaggaagtaccagtgcttggtgttggctcccccggacagggtggcggtgctgacgcggttgccggactgcatgtgcgaggttgtgcggctgccagggtggccggtgatgctgctgcctgactggccttgctgggagtagagggagacggcgatgttggtctgggggccgacggaaaactcgattgggtccgtgtacgctacctggccgcgggggacgacgatggaggaggagccgttgcggaaggtgaggggtttgagtgttgcggcgtcgatgccggctactccggctttgtttccggcggcgagggcgatggaggcggcggtgatggggaggtcgctgccgccgaaggtgttgctgatttggatgcggagtctctcggcgccgatggagaggtggagggtttgtctgatggtggcatcgcggaagacgcctccgttggtctgtgaaatgattgtgttagtttgggccggattgcgacactgaagagaaacatacgaattgcgaaggtggcatattgttaggctcaaccagctgaggcatggaagtccatgttgccacccagtgattatcctcctgacgagagttgagttctctctcgtccaactcggcggttggaatagcagtagcccatcgtgctgacaccagcagcaacgaagaggcaattctcgcccacgaagaaagcatggtgaccacttgagttattaatttagtcaaagctaagaacactcgcccctccaagacctggtgattgttgaaatgagcattttgaagctcttatacaacccgctggtcccgccggcggatgatgagtccccgaggtttaattgtcggtgctaaggagaagctatctaatttagccacgaggcagagtagtacggggcccaacagatcctcgtgcgggctgcgtaagtgggcttagatcgtggttatttacccagcgggaataccgtggcgggcttgggtgatgcgggtgatctgctgtgtcgtcctttctgtatcgtggaaaatctgtggggaagcgggaagaacaatggaaccgagaccatgagcattatggtggcatgtcaggggtaaatatcccaaatccatccacactcgagtttgttggtacttcaaatgcattgcggacttgaggtatggaattaagttcgcgccgtgtatagtattgcaaactcaaacccaatgccgaacttacttcctggccagaacccttcgagctttctcatattcatttcttcctcttggtaacaattgtctgaacattcttgggctgatggaaccaccggttgatcagagtccattccttcttcgggtccaccaactcgaaatcgtaatcgcggattagttctggaagggccttgtagatttccatcattgagatctgtagtttacattagccaactgtgccccagtgggaaaagaggtatatgctcacattcttgcccaagcacatatgggggccaccaccaaactatttccaacagagtcagtaacaggagctaataaagggtaagttgggtcaaagactcacattcagcatgtgtctctccaaatcagcagcattacgacttaaccacctctccggcacaaactcatctgcatcctctccaaacacacctttatcacgctgtacaatctgagggttgcatccaactttcaccccaggagggaagaactctcccaggagctcaaccccttccttgggggtgtaccgcgggaacgacagaccaagactggcgtggaccctcatgccctccttgcagcaggcgtcaaaataaggcagcttgactgcattagcatacctgactctcccagacgagctgatccgaccctcggcaacggccgtatcaatctcatctctgagcttccggtaggttctaggatttttcgtgaggtgataaagaactgaggtgatggcactagccgtggtgtcggatcccgcgatgctgttgtacaaatgtcagtatattcacgcaagtcaaaagcgaaattaacccacatagcggtgtaaatctcccctctaatctccggcggaccaaagttatccaaatccccatgctcctccatcactcggaagaagctagccagcatatcatccttctccatcacgccaccgctctcctccagctccttctgtcgtttctcaacagcctcaacccccgcatctgtcatcgtgtccatcgccttgacagctgccatcgcaccggggacgacaatagaggtcatcaaaacaagactgcgcatccagcggggcacaaacgcagaggctgccatgaataagatcagcacgtcggtcgcgttgatccagcccctgtaatcctttttggtctccagaaaaccaaacggacggctgaagaaaaggatgccaatcacgtcaaaggcgtagtagcgaagccagagagccatgtcagttggcctgccagactcgctggcgtccttgacacgttgataaagaagttcgatacactcttcgatggctggctcgtagcggccgacgttggtcatggtgtagacatggttgaccagcttgcggcgctcgccgtgggacttggggtctatgttgcagaagtgctccgggaatcgggctgtttaatgttagcgttggccggtttgtcatgatatttctgttacatacaccatggcattgagaaagccgagtaaaactcagtctaatccttattgttagcaaaatcctcttacccctagcactccaggttgaaaggtatggcaaacgtaccttggtaaaagttgtcccggctccatagatggccttgataacggttgggtctgagatagacacctcgttctcggcgatgcgaatgatgggacctgagttgttagctaacaccgtgtcttgatatcaacaaatcaaaggacaaggcactcaactcaccatgtttttcgtgccactttttcaacgtgacctctaagtgacctgagtacagctccttgatgatccacagtctcgagaaagaggcgagaaaaggacccgggtatttggagtagggatgtaaccatcgacagtaaatgatccacccaacgaaccaggtgaccagaccacctagtaatatcgacatgactgccattactgccgtcagtgggttccgagcaaagtcagatgatcaacagaagaactggaacttttccccatctccctcgtccaaaacagcgggctcaacctcctgttaagaggactgatgagcgggcatcactctcgccaagatcaaaccctaactgtcttacacaccccccagttcggaggacatcctgcagggccctatcaccattatatcgctccaccttcggcctgcaggtatctttcccctctcctggtaaaggtcttggcccgcgtctgcagaagatctcggtcaggttcggagggttgcaacccaatgagagctcacatgtcgaaatggaagctgatcttcatcgacataatcgccagccagctggacgagctggtgtctcctcacggtcaaccgggcgtcaatattgcgtgatgctcgacactgcatacgagcggttggtctgaaatcgctcaatcatcgacaagccaaggacgggatacagttctacttggtgttgttggtggttatcattgagccttgtgtaaccacgcaagactgccgggctgtgccacaccagtccgccgcccaatcacaatcgtccgcttgccatccgagagaccggaactggcaaggcccttctgcagcatcacatcaagtcagtggtttcgaactctcagaagggtgttcagtgtcgatagtgtaaaggtgccatgaattcctcctccccgggccaatcaacggtggcccatatatgaaagaacctcaactggagaactacactactgcagtcatcaaaggagctcccgccacttgatgggccgatatcccacgatttcggccgagctgtttgaccccgcagcgccaacacggacgatgatactgtgctgcctgagcatgcgtcgctgggccgttgagagctgtttgaggtgggaaaacttggattgtccatgccattgttgcttctgttggtagccaaaagagaacgttcgagttgcgttgggtgttgtgcaactccagggcctgatcccaggaaacttaagcgcaatgtccggtgccaaaagagtgggggagccgggcatttgtgtaaccatggaaatgtagaaaagcggcagagaatggactggttcaagagtagcagtgagtagtacaaacggaaaaatgatcttcacaccaaacgcaaaccccatccttgccttgcaacacaacttcacgcccccgcgtttctgccttgtggaggcattcctcgagggacacaagggtggcccttgaacaaaaagtcatgcacgccaagtgacagctaaagaaaagagaggcttcgcaacctcggatatcattctgtgtgtaagtagcccaattgtacagtattaaaaaaaaaggtaaacagaaaagacctcgaacacaaaacaaacagaccagccagcccccaaatccaggccagcaaacgcaaaatgcaaacgcttgaaatgctgccgatattgcggtttagtgcgaacccataatctcgaaaatgctcgacatgctagccttgggtttcaggcttccacccatgcccatgcccatgcccatacccatgttacctcctgacaaagacccaaagcccatgtacggtgttctggtcggtgatggttcgagaaggtccaggcctggcatcatcggttccggctcgtcgtctggatgacggaaagaaaagatcgagctcgacaagctggggaggggtgttgtgggcgagggcgtcgccgttgaggtttcggacgatgacgagtcgttgaggtatgccagtagaagagcatgaagctcggccgtcgcagttggggagagaattgttggccggtcgattcgcttgtaggaacgaggtcgggaccccagtgcggagccggttcccgaacgtgccgaatggaccgagaggggccgggtggccgtttcgttttcgggtaaggaaagcgtgatcaaagatgggagctcgggtctggaggaaggccgaggggactcgtcgagcgaagggagactagtcggtgaactggaaggagaaagagcgggaggagagagcgagggactggtcggagaagaaaagtcgagagaaagatcgagcgaagtggacgggaacgagaagtccagcggttctggtttgtctttgagtggtgatgatattatggactgcggcctgggttgtggtgccatggagagcctcttgctgtgccgacgctccaactcggcctgcaagtttctgacgggagacgaagcgcgctcatatttcttgttcggtctgctgggccccttctcgaacaaggcaatagcttgggagacggggacgttgctttcagtggtatggttgaggtcgtcgagcaagagcgagaggtcggcttcttcgagatcgcccaacagctcgaagactcggtcaatagacgagcgcgaaccggtgcgcgcgtgtgtcggcatcttgaagtatgtacgtggtttgtcgtagtagtgaatgaggcggtataaagagcggatagagcgcgataggcccaaaaggaaaagcaagtaacagaaaaaggcagaggggaatatcaacaacgaagggagctcacgaagagcatcatgacatggcgagggttgaatttgaatggtcccgaagcgtaaaatgaccagaaattgggacaagacgcgccagctgcaacgccaattcgccaattcaggacggtggatccccccgcagactctggcagggactcagtgggcttttgggcgggctttttgatagcgacactgtgcgctagcgtcacaggatcccagcgccctggccgtggaacccgggcccgtgctccaggaacggcacacgatgaggtggtgcccctgaacaacctgcacggaacgtgccattcagttcgtcatcgcatcattcgaaacatatcttgtgacgctctctcatcgccgccacccccaacaccccctctgaacattatctatcttcacgagccgtccagtgagtgcttctttctctggttgactgcgaccgactctcgctcgtctcggggacgtttcgtaaccatcgctctccctacctacttcaggcgtcatccctcaatggtgtctgtgtttgggaagagcggtttgaagacgttaatgaagggagtttattgcaataccgacgctgatcatggaacagttgaagatggcgatcaggtacatgaccttttcagcatccgttggatcagttgatgctccaagaacctggaaagctgctcaacaaattcgatgttgataggcaggccaatgccatcttttatcggcacgatggtctggcgaggatgacctgcatttgttagcggcggggctgtcggttagcgtctacacgcaacctccatggtcttccgctgcctgcaccacatggaagcaccagcacaacgtcggcccattttggttctactttacccaacagcaactacactaacaagtgggatttcagtagcgtaacctacacttacactatgagcttagaggacagactgcctgctttgttcccaaataccatggactcgatacccggtctattggactcggggacctgaggcggagcaacgatcttggacttctgcgagatatcggggatcaacagaccgccagtcgctcatcaagttagagtgtgctcgaaacatgcaagttggacgcatcattgctcacaatacaccttcttggtcacgaataggaggcaaactttacgtcttagttggacagtgccgtctcagtcggggatgattggagtgcttcatggtaaaggtggtggtcacaacagctccgctacaagctacaccttgctggatcgatatgccaaacctggaagcggagtcctgtcttgcattagcgtgggcttcctggccagtcatctctggatgatgtgcgggagtgtggacttacacaagtgacggacagatatcccctggccgcactaagaacatatgtcaaatcatgaagcgctccattgccagagccacaatgcatgcaacctgaaagagatctcggtgtctatttagatctgaaatccgcaccatcggccccgctgcttaccttccgccatcggctactccctccgcccaggcatggtattggtaatcgcaatagctaacacgaaggaccatgtctattgttggtagcacatccctgaaatggggacaagtatcccgcaaacacccgcgatatgcgggcatttgcatgctcaccgtgttgccaacaagtggctgttctatgatagatcatagagctctccaacttgaaatgcctatagatatccgacaattaaaccatccttctcaccagtcttccttttccttgtatctaccttgcttgacaggtactgaccctgactctaccagtatgacgctactgctatctttcaaacaacacttcacgtaccagctcttagactacctaaccatacagagcaccatccttctcctacttctcggcatatcaacctaccaagttgtacactttctgcgagcaagaaacagaccaccactcccaaccagtccgcctggtgagtttcttcttggacactaccggctagtccctgaagatgccgctttcaaaaagtatgcagaatggtcaaaagagtatagtacgttgccactttacgttacaacccctcacaaagggatcagtacccggttggggtctctgacagtatgcagacagcgatgtgctcttttttgagacctttgggacgaagtggatagtattgaacagcttggaatcggcaacagagctgcttgagaagagaggatcaaattatgcggatcgtccgcgatttgtgatgtttgaggagtaagttctgaaaactaaccacacctgagtaccccttttcaacacccaccttgatatagaaacgcggatacttggatcgaaaagggtttacagaatcaacatcggtaatcgagctttcaactgatggagccaacacacagaatgggctggtccccaactctcacatggcttcgctgggggccaaaataccaccttcaccgcaaagtcttacagcccccttttgccaagtccaaagtagggcagtatcaagactaccagctacgagaggcactgatatgctgcaaaagcatgctcgacgacccggaaaactgggttatagccgttagacggttcgcagtggccatcgttttgaagatatcctacgggctcaacgtcgatagcccggacagccagtggattaaactggcggaagagtcagccgaagcgataggtaaatcagggccaccggcaagttcgatcatggatcgatttcctctcagtatgcttttttccttcactggcatgttgaccgttgatacctactcatcaaatttccagcaagatacctaccaacatggctacccttcatggaacgcctccgctacgcccgaacctggcgccacgcaatagaagacatcacccgcctccccttcgaagcagccatgtcctcgcccacctccccaaccaaaagctttgtccaccaccgcatggccatccacaactccaatctcgaacggtctatcccaaacgacttcaccatcgaagacatcaaaggcgccgccgcaacgatagtcatagcaggcaacgacacggtattttcccctcccgtccttttcccaccccctattctaacctttccagaccgccgccacattgatgctcctggtattatacctcctcaaaaaccctcacgtccaatccctcgcccattccgaaatctcctccctcccccataatctccccactttctcctccctcccctccctccccttcacccacctcctactccaagaaacctaccgcctaaaccccctctcccccctcggaataccccactcctccatccagccggacacctacaaaggaatgtacatcccacccaacacaatcatttaccaaaacatctgggccatgaaccacaacccctccatctactccgaccccgacgacttcattcccgaacggtacctccccgttgaccaaggcggccgaggtgagcccctgccacagggaaatttcggttttgggaggagggtctgtataggacgacatctggcggagaatagtctgatgatagttttggccacgatactcgcgacgatggagattggcgagccggagacgggggaggtgggtgaggagtggagttttagggggcaggcgtacgtatttcctgatgtgaaaaggtgggatgattgctgacaggaaacaggattgtaatgccgtttagggcttcgtttaggccgaggtcggacaagatgaaagagttgttggatgaggctgttaaaaagttggatgaagaggagggggaagatcgttagttagttgggttatcgtgaaggtggtgctcgtggacgtgacccaagtattaaaaagtattctagctcgttgtatcgacagtaacgctccatatttaccggatcccaagcccgagccatacccaatatatgtacaaaaaagagtatggcgctctgcaccgagtccagtctggtgtgcagagtccgccgggtatcattagttaagtgtaatatttcccctgaactgaacaaatgaacgccgtcatagctcatgatcatcattatcgccccctgggacgaacgagtcccctggcccaccagtcccctcgtagccctgcatcgtcttgcagtcaagatagttgttctcgataaacggagtggcgatttgcaccccgtagatctctgtccactccttatctgccccttggaacaaggcattcgtcctcgccttgacactacccagcacagccctaggtgcatattccccagtcgacatggtcgtgttgaacagtctgatcatgttgtcgcatgtcgtaccattggcaaaagtcggctggttggtgatgttcttgaacaactccatcgggtacgggctgaggttcaacggaaggcgcttcatttccaactcgataaactcggccgagttcacgcttgagcccttgaagtgcgtggcgccgttgggtagtgtctcgtaggcgtcgcagagaggctcgtactcggctggagagacaatggtaccataggctcgtgatccatccaaagcaatgtcgttggtagaactgataagctgcgctggtgcccatctgaaggaggaatacccatcacccataaagtcgaggaacggaaactcgaacccaacacgctaagaatagttagctaacccggaccaatcgtctttgtatttgaaacaaacacaccgaaaagtcctctatcgtgatgccatatgccctgaactgaacatcgtgatcgtgggcggcttgcagcatgacagggtacatgccctctggaaagtctggcaacaaagatcgataagccccctcgaggatccggtactgtggtgggatcaggcggcgagctgactcgagggagataggaatgatggccagcgtggcattgagaactccggttgcactgtttgggaatgattcggcgagtatgttcgggaggtcttgcgaatagcatacgccgccatttgccggagctgacttcccaaggctgaggaagagtgatgatagtaccagaacaaaggcggccgagattggcaggatagaaaatgggaacgccatgttcgatcaatgctgctttgccgatgatttccaagggctgtgcaaagggaaatatgagggggacgtagcgaatccagacagcacccgcttaccaccacacaggactcaaccaaagttgagtagaaaaaagagcaatattaaaaatcaatcgcaaatgacataacaagagggaaagaagaagacccaaaggagtgtaggttcatgagatgcgatcacccagaccttttgagtgaagtgcacttcattgtcctgtccctcccattgcccctgggcggatgggcgctgggcccgggggaagcaagacaagctccatccgggatctgttacatgcctccaaccttgacatttcggacgggccagtacatccgtttcggaagggggtggatgcgagaccagctcttccctgacgggagtgcgtgggccaagaccagatctccagagtgcccttggggtgcccccctgtccacgtgcactcccgagaatggcagtttgggaacatttcacatggcccacgggactggcgactggcacagcgaattggatgggagcaccaacacacttggaggcgcggaagtcagcgttgccgaaggctaacagcgatagtggacgacaactggcgaccaacagcctgctgcccgcacgccatgaggaacatgagggagatgcggatagcggcctaaaatgggcagaaagagagagaaaacggaaagtgggcgttacgcagggcgggaacacccagtgtcgtgcctaggagatcaaaaagaaaaggtccctgggcctcgggggtaggccgtgtttcgtcccggatgctcagtgttccggcgcacgccgcaagaccctccaaaagtcagcccgccaattggaggtcatcttttgccgttgttccggcgtgtttctgcgggattctcggcggcatcatgaaatatcgattcttcggcatgtttcggtgaaaacaatagcgctttttgacatgtcgtcaatctttggtggtgttgttgaagtcaagactgagatgcgtggtcaaggttgatgggcaggtgggagatgcaaagatgcgggaggtgcacgggccactgaagacttggagctgcctggctacatcgcagctgcaagcggcccggcgaactcaagatccgttcttcgttgtggacggcaaaaaaagacagcgcagatcaaaatctctgtttcctccacgggatgaggaaaacaatccatcaagagaggatattttgggcaattccgatatgttaccctcgcgctacacgccagttgtcgcctctttgtcgatctgttccagaaggtgtgagggcaatgtttcaggaacgctacagatccctcacctcctgtctggcagctgtcccgcagccggtgacaactgtcttcaaggtccacgaacacttctccccagctcaaaacacacaagccactagtccggcacttggtggaccgacaagacaagagttttgctagttcgtctagtggatgtcgtttagctattttaagatctttatccaacaagagacagcccgggagatcccagcggagtgacatcccggagccgactcgcaccaacatgttcggacgaaggctgtgatcaatccaccatgctgaaccaggtgttgactctaatgggcgggcatcatggcattgatacgccaatatttcactatcactatcctgattctcaccctcatccgaatctatggctttcgagatatcaaagtctttagggtcccgcatgtcaggctctgttctttggttggaggatacttctttcacgtggctatcaagagtcgcgaggcatagcatcactctgttggtctgtttgttagagtgaccgggaataggggcattgcggacttactgaccacaatatgtactgcagctcaaggcagatgacactcgcaagacagtggtctgaaggtcaaatggccttgtgaggcgttctcaatgatggatgaggcatcttggtacagttcgcgtgacttatcagcgtattgattatgaattggcaagcaaacggtccgaaaccccctcagcaccttcagttaagcacgttacactgttgagtttgtgcttaagatggatactatttcgtctgtcggcaatcggacttgtggacccaacgaggatccccaaacagaaaatgacccagattcatatcactctctcttcatctgtttattatctcgaggtatgaggtctcacgattgacaagcctccccactaaaaatggtatcatgacctagtgagaaaactcgtgccaccatgaatgacgccctcacaaatcatccggccccatgtgagcatggcatcacaggccagcgatgaagtcggcaagcttcttgagtgagtatatagactctcccagtcaaccccttacagctagaactctcctcgttccaacagtattcacatccatacaagcacacacccagagcctcgacacagttcatatcaagagcattcctcatcttcacacccacactcacatcaaaccaactttttctccaaggagattcaccaaacacaatcagcaatttcaccatcactaaagcagcaatgtcttccggcggcggcgacaactatacctacaagggcagtcacggcggcggcagctctggcggttacgcgcctgccatccctactcatcgaaagaaaccacgctctcccggaccccaccaatgaggaggcctggaaatttcctggtcataacgacggcaatggtggcaacaaagggcaagggaggtcacggcggcaacagtgatggtaatggtaatgacaatcgccaggggggcgggggcggcagcggtgtcaggacctaatgtggctggagttgaactctcaacaataatgcttaggcagttcggggtattcgctgggaatggactggatctctaatagaactggcacattttggtgttttggggtagtttttggtgggtgaggcagatgcaatagttttcttgtcgcttggaaggcagttgatttattctcagaattcgcgtttgtgtgccctgattatcaatttttcaatgtcgagatgtgcgcattatcgtcgtgattgatgtagggatatagttttgagacagtgtatgactagagagtgtgttgcatatgggcggtgtttgaatacaacatcttgtattatatttcatcacgcttggtgattcgcaacgctgattggctggagctgaaaggggttaccgtaatattcatggttgtacgccaagcacctgaaatcacaaggttcacagttatttttctttatgttattaggccgccttaaggatagctcgctatgactcggcttgaagaggaaatgatcaatttcacgactcatctataaattctgtgttcaaagcgtgtccgtagacagtgttcttaaaaattccttcactttaccctcccatctgaacttcgtttgcgaaagtcgacatcatggacgccggtcgtggagacttcatggccaagtttttcggcgagatcatgcccatgatcgaagctgcccgccctgtcgccaaagtctcagcgcgtttcgccaaccaacgagcatatagcaaagggaccaccgccgaggagcaagaacccaaagatggcatcctcaccactctgtcccagatcaaggcaaccggatcgttcgcgtcgttcaaatctgtctttgaccctttcgagcgtcgtctcgttgtcaagaacgttgggccaatcaagttcccaattaccaagttatagacacgccagttgatcaagagagctcgtcaggccccttacgacaaaggcaacaagaccctcgtcgacaccagcgtccgcaagacgtgggaactggatttcgcatttggaagacgcagacacagaaaagagcgagatcactttggaccactcacccggcccgtggaaagcatggcgtgagttcagtaacgcaatgctcaaggacattgccaccgacttgggcatttccaccacctccggccagtccatctatgcggagccatacaagttgctcattcacgaggaaggcgccatgttcaaggcgcacaccgacacggagaaaatccccggcatgttcggcaccctcatcatttctctcccgtcagcccaccaaggcggtgacattgttctcaaataccaaagccagaccacaatctacaaaacctccgaacacaagcaatcctgggcctgctggtactctgacgtctctcacgaagtcctcccaatccactcaggctaccacatcgtcctaaccttcaacctggccatcagatccgcaggtcaaaccaccaccatcccccgtcccatggccccctgactcttctcccaggcagaacccctccgtcgggcagtcacaaagtggctccaggaaccagcacaacccaaagccctgttcaacgttctcagctacacctacacccccgcctcccactccatgcaccacctcaaatccctcgacctcctccaaacccaaatcctccaccacctctccacctccctccccttcagcctccaccccgtcgccctcgaacgagaagaatacgtcacctgctcctacgactccgactgcgagctcccaagcggtaaagtccggcgcgtcaacctcaacgccaagcgccccaatcccaacatcaagccctggcacgacccagatgacattatcagcgaggagcacaggatcaagtggctcgtcgatctggacggcaaacccattgagggggaggaccttatcttgacagaggggaatacccttcagaagagaccgtttgataatattactggtgaggagacagagtggacggggtacatggggaattggggaccagagcgacccatttgtatcgtgtcacggcgttggttttggtggctacggggacggttcctgtttctgtggatgatgatgacgaggagaatgtcacaccgggcgtcgcggaatctggggctgcggcatctggtattgatgtaccagcggctgctgctcccgatgttgccactcccggtgttgctgccaccgccgaaaacggtaggcatattccggtgcccgttcctccctcacgcatggttggtgcagttcgcccgagtaccatgcgcaacggttatgttccccttgaaatagtcagagacgcggttaagcgcgctcgagaggagttgggcatggaatccgtaatcatcggcgaaatgcattttccttttctttttggatatcaacacatgaatttgacaacaaacaaagcataaacttcacacacctacacatagaactctaattagaaccttttcacctccatataacagtctccctcatttagactttttacatcacccacaaacctactttaccatttccatgacatatccccctaaaccctctctctcaccacaccccccgtcacattcgccggtccatcccactgcaacctccccggcaccctcttcgcaataaccggcacccaaacactatcatacagccccggccccccatcggccgccctactccccggctccaaacttcccaactgcctctgatccgtacaacacgggctattaaccccccaaaacggccccgccgcccaagccgtccacccaatatactcctcattctcctccatataccccagcatcccctccaacatcagtttacactccgtcgtattcgaacccccaaactcagtaacaaaccccttcaacccatgctccctcaaccaacccgtcacccccgccaagttcgccaccggatcctgcgtacaagccgtatgccccccgctaaaatcctcatccaaatactcatggatatccaccgccaggtttttaatcgggtcgacaagtttgtgaatccatttgctgtttgcctcgtcacctccctttgtccagtaatgcccacccgaccaggcgtttcctggagtcaaaatcatgttgtttgctcccgccgcgcggattgccgtgatggcggcttggaggttggagaagacgagccgggagggcatgctatgcggttcgttcattagaccgaacaagactttttcgttggttttaaagcgggaggcgagctcgccccagaaggccgcaaactgggctgttgtcgcggcggtggggtcggaggtgttgcctatgacggagccggagaagggctgggaggaggggtcgttgtagcgcatgtagttgtgggggtcgaggatggcgtctgtttctgaggttaatgatggtgaaggagaaggggggggggaggagagaacatacaagcgcccttggtgatggtgatgtaatctatcgcctctttaaagtgctcaaagtgagtctcgttgaactttgccccgaggccgtaagacaaggggcacatcctctcaaggagaaaggcaacccggtggaggttgaccttgtggctgtcgatcatggtgtcgacgccagaggtggagatgaaggcgtaatcgacgccgaaacggccggggagaccggtgccgcgggtttgggtcggactccaggcgccgaactcaccgcttgattgggcgacgccggcgaagtagatcgttgcggatgttgctggcaaagcagcaagagctgccaacgttggcgagaacttcattttcaatcagtaccaagaaagatgtcttgttgccgaaaactgacgagtcccgggaaggaagcaatcagtgaagaaggtgtccgactttcaaacattttcatcgtgcttgccacacgaccatataattttagtagtagccgcaacgaagcgggatgaacgagcgggtgcaatctattttctggaaagcttgaccgtgagccgaagtcgatccccgatctcccatctactcggggcatgttgcggctgttcttgtcgaatggacgcccgcttattgatgtgatcttcagaggacaatcaatgggaatgcgagcttggcaaggatgtggtgataacggcgagttgggaatggcggttttggcttctgccctcggagaaatatgaagcgggcagtcgcgagggcggagggagcctttccgggtgtgggtaaatctgctgcggttgccgttgacgcgtacaaggagtggcagaaaacatcatcgtcaccatcatcaccaccaccaccagacatagagtcaatcaggacaaaaaaataacaaaagctcaccggccaactccgtagaggtggccggctacgaaaccctcggtagggttttcttcgtaatgggggggcggtcgaaggggggtcaaattccttgaaggccatcttaaagacagggcatcactgaggagtcgaacttaggcgttcacggagcagtgctttcataccgggcattgttagttgcctaatccgggccacctatgtcttacccgctgagccatctgaccattccagttaccagatgagtgcgtaggtggttgctgaaagctacttccaggttgcgggcactgatacatataccgtcagacactgttgcgccctcgtatgtcctccacgccactcgcaacacaaacgctggtcagttttcattgcaggttgctgcgggcaaagatcctgactgcctttgtgttttatctctatgaacctggctacaccgaacccagtcgtcgactttcaatctcccacagctgcattgcgcctcagacctttcgcagagacccaggcccgatctttcgacagactttaaggcccagcccgattggcattcggcgcagcctcactccaaaccggcccaccaggagccacatattgtgtctgcccctgctgaatcctccacagctcagccaagatctattagaatacctgtcagcctcaaatccgccaccagcatacatcgtcctcaatagacttacaccagggtcttcgggcttgtaagcacccggcagagcaattcctgcaggcaattgcgtcgtcccaccttgtgtcacccgaatctgagtgcagcttggatagaactgcgcgcccatcctcgtccctgcaacgtgcaggcccagaatctcgtgacgaagaagatattcacccggagctagcttcggtgggatagtgacggaccacttggcgccttgttcgcgaaggaggtcagaggcccagggcggatgaccttgcgggttgtaggagagctgctcgatcttgacccagacgttgccggtgtcgcctttgaaggtcttgcaatcgttgttggcacatttggcgaggtaactgggaaaacagccgttaggcgaagatgggatcagtgttagaatggggaagcttacgtgaatacggggccactgtgggaagatccccattgatcccagttgaaagttctaagacagttgtggtaagttgggatggactttgacaatagacaagaaatacattagcacttacactttgtcaccagccttgagctcgatgatgccctgagctggaatatttccaccagcaccacacctggcgtatcatcagcggcctaaaagtcaaagtcagaagtgggagatggcttggacatacgtgatatcattcgtcgtaaaatcgggcaccggtccattgttggcaagctgtcgtgcatagcggacaggaggagggttcacgtagttgtcctgtccaacctgccacgcgagatagttctttccgtccacggtgatgctcttcaggaagccatgtcctgatacaaggcttgcaaggccaacgaccagggccacagttgaaagaggtgtcatttctgtgatgttaacgtcaagacctgggatgtccttcaacttgagcaaggaaaaacctcagcagaagaacttgatcgagagacagtcctccttatacctggatcttcctcagtccaagttgatccatgtccaggaattgctgtcattcccagtgtcaatcacagatcaaaacaggtcaagtccatattttgagacagttcgagagagttgattggccaagtcacttcctaacggagtagctctgtccgcggtcgtcaacgctgtgttaatcaccgacaagtagtctgaacggcttacagccagcacctgacatgttgggacgcggcgcttgggtggccgtcattggagggatttcttggataccgggtagcctcgttcccttcaccagccgcaaccgccacacccttggtggcggccttggccatatcacgatacgcttggcaagaatctagtggtgagaggtatgtgtagtcaagaggtgctctggtcataagaggaccaccgatatcgaaactcagaaaagaagtcaccgagcaatattgtcatcctgatgaagatatcttgtcctggcacgctgatgaaattgaacgccgggacggtggtcgttagctgagaccactttcggtcaaaaccatcagtctttatgatatcatcatctcaaggtcttcaacaatccgtcaaggccataatgaaacacacaatgagctagcaagccgttgtaccgtctactataatcgccggtcagcgttcaaacttgtcaggagatgtcaaccccagcttgtgctacaccagatgatggctacaaatcgcgcatataggtactcgtcgttggcccgaaaaaaacgtaccaaacatgcaccttcacccccctctcaacttctcgaagattggaaaacgggccggcctgatgccagactggcgcgtggatggttcgtggaacgctgaagatgcacggcgccaagacttcaagttggcggacacattgatccacacttgacgtgctgtggggccatgtctccaccttccccatccccgcaatctttcgtcttgaaccaaacagagggcggcgtcgacatgcagccaagctcgcacaaagcatcttcaacatggagctcgtgatggagactcatccgtgatccttcctcgggatggatggagtgaaccccacggcaacccacctcgtaaacccgtcgcatccgacccgaggatgaagcatgagatgccgccgggtattctgccagccataagacggttgatggcaatcacggaacacgcatcgggacatcaaatcgacccctcatcaagggcggggtagcacacgccccccctaagaggcaccgtgcagtgcaggaagcagggacagatggagtggagaggaactgaaagggatgtttaataccaatgacccctctgcctgccctccactgccctgtgggacaagagaaatctctttccttccactcaattcattgttttgacagcagacgaccaagtgctgctgatgttgcgcaagcacgacagacaggaccgtgagactcctccaacaaagcctccgtcccacacccagtcgtccacgtcgtcctcccctcattgcgcctgctccgccgacctcgctacctacctttggtgtcattgttgtcagaagccaacctgccctgaatgtgaacaaatgacccaaagatcctcgatctgcctcgatagcgtaacgggtcgcgcgcagacataatgtcgaggtccttgctccagccggcgctggcttgcaacaccgcgtcttgcatgcctcgtccctaccaacactcgcgccccgttgaacgcgcctctaggccgtcattgacagcagtagctcgtgttttcggtgagccgccacgctagacccccacgcccaacccttgaagtttgttccttttcatttttgtgagccatttgaacctaattcgacctgacagacttcgccccagtccgcgctggcaatggcagcaccgccgtgatctcacaaaaggcgtggcacagcacgagaactgccggaagtgatcggccgagttcggcctcgttgagtcttgctctcccgaaggctcaaccgctccagctcgtccgccatgcctccgttttgtccggcatcccggctaagccgtcggcaaggagcccaatggcagcgtactccaccgaggcaacggcagttctgccgccgaccaccccgtactccaagctgactgtgggagtgccccgcgaaatatacccaaacgagcgccgtgtggctctcacccctcagaatgttgccctcctgctcaagaagggcttctcccaggttcttgttgagaaaggtgctggtgccgaagccgatttcctggacgatgcctatgccgccgccggtgctaccttggttgacgatgcttctgctgtctggaaaggttcagacgttgtgctcaaggtccgagggccaagtgcggaggaggttgatctgacacgagaagaccagaccgttatcagcttccttcaaccggcccagaacaaggcactcgtggagaaactcgcggctcgcaaagccacctcattcgctatggatcttattccccgtatttctcgagctcaggtctttgacgccctcagcagcatggccaacattgctgggtacaaggcggtgctcgaagcatccaacaactttggtcgtttcttaactggtcaggtcactgctgctggtaaaatcccgccctgtaaggttctcgtcattggtgccggtgttgctggcttgagcgcaattgcaactgcaaggagactcggtgcaatcgttcgtggattcgacactcggcctgctgcaagagaacaggttcagtcgcttggcgccgagttcatcgaagttgagatcgaagaagatggctctggtgcaggcggttacgccaaagagatgtcgaaagagttcatcgaggccgagatgaagctttttaccgagcaagcccgtgaagtggacatcatcatcaccaccgccctgattcctggaagacctgcgcccaaactcatcaccaaagccatgattgagatcatgaagcctggatctgttattgtcgatcttgctgctgaggctggtggaaactgcgaaaagaccgaacccggaaagctgattacctacaaggatgtcaagatcattggtaagtcgtggcacgggagcagtacccgaggttgctcgtgactaaagtaagataggttacaccgacttcccctctaggctaccgacccaatcttcaactctgtactcgaacaatatcaccaaattcttcctgtccatggcaccgaaggataaggaatttggcatcgatctgaaagacgaagtcgtacgcggcgctattgtgacacaagaaggccatattcttccgccagcaccccgaccagcacctccccctgctcccgccgctgcctcgactgccgcaaaagaaactgaagtcgtagcacttacaccatggcaaaaggcaactcgtgaggtttctctgatcactggtggtatgggctcggctgtcgcattgggcaagttcactactcccttgtttatgggcaacgcctttacctttgctttggcctctctcatcggataccgtgttgtctggaacgtcgctcctgccttgcattcacctctcatgagtgtgaccaacgccatctctggaatggtcggcgttggtggtttgttcattctcggtggaggatacttgcctgaaacgatccctcaagtctttggtgccgcctctgtcctgctcgctttcgtcaacattggtggtgggttcgtcatcacaaagcgcatgctcgacatgttccgccgtgctactgatcctcccgagtacccgtggctttatggaatcccggccctcgtgtttggaggtggcttcatcgctgcggcctcgagcggagctgcaggccttgttcaagctggctatcttgtgagctcgatcctttgcatcacctctatttcgggtcttgcatcgcaagcaactgcccgtatgggaaatatgctgggtattttgggcgtcgtgtccggtgttctcgcttccttgttggcagtcggcttcacccctgaagttctcactcagtttggtggtcttgctacgatcggaacaatcttgggcttcctcatcggcaagcgcatcacccctaccgatcttcctcagactgtcgctgccctgcattccgtggtcggccttgctgccgtcttgaccagtatcggaagcgttatggctgatgtcactgacctctcgatgcttcacatggtaactggctatcttggcgtcctcatcggcggtatcaccttcaccggatcgattgttgccttcatgaagcttgccggtaagatgtcctctaagccgcttcggctgccaggtcgtcatgccgtcaacgccggtctactcagtgcgaatgtggtcaccatgggcacgtttgtcaccatggctcctggcgcccctctgattgccgccggtgcccttgctgccaacaccgtactctcgttcatcaagggttacaccacaactgcagccattggtggtgccgatatgcctgtggtcattaccgtcctcaacgcatacagcggctttgcgctggtcgccgagggcttcatgctgaacaaccctctcttgaccacagttggagcactcattggcgtctccggttccattctttcttatgtcatgtgtgttgctatgaaccgttcacttgtcaacgttctgttcggaggaatctcggcgcccaccaccagtgactacaagattgaagggagtgtgacacagaccaatgtcgaagagacagctgacgccctcaccaatgccgagtccgtcatcattgttgttgggtatggcatggctgttgccaaggcgcaatatgctatctcggatatcacccaaatgcttcggtccaagggcatcaaggtccgcttcgccattcaccccgttgctggtcgcatgccgggccagtgcaacgtcttgcttgctgaagccagcgttccgtacgatatcgtgctggaaatggatgagatcaatgacgactttggagagacggatgtaacccttgttattggtgccaatgatacagtcaacccgattgctttggagcctggtagtccgattgctggaatgcccgtcttgcatgcgtggaagagcaagcaggtgattgtcatgaagagagggttggctagtggatacggtgagtttgatgggactcttctgtggctgggcccgatgactgacgattgttagctgatgtccccaacccgatgttctacatgcccggcacgagaatgctgtttggcgatgctcgtgtgaccactgaaggtacgaccctctcttattgctccataatccaatcgctgacaaaatcttgctacatctagccatcaaggcagctatcgaaactcgcttcaaataaaaggagggaaagaaagagggtcgttttctgcgctgcttttgacttttcttgcctaaaaagatacgccttcattgcccgtatatacgtcctgcaacaaccctttttccttataacctttgccttgtcttcagaattgggaattttgctttgctgatagagcaagagagctgtcgatctctttgaggtgttgcatttgcatgcatatgcgttggtctgttagacatgtatgcgagagagtgaagtagaggagatgacaaggaagacgtccgtatctgattttttaatcaatgctattttgacaaagcagcatggctcgatatgcgacatttaaaagagaaacaaacaaggctggggacaagtgcctcccaggcgcgacttagacccaataagttgggtaggctgcgtgactgccacaacctgagtgtaaaggactttgttggggaaggagcagtcggtcttgtggagggaaggagcactcggtctcggagacaaggatgtgcccccactggaataaccagcgggagcacagaaaatagcgactacaaagccagcagcttaggcttttttttcttctcttactcttcggctagcagcatgctcatcgacccttcaaccaccaggcttttgaaaaggcatcgcagtttctctctctctgcctgactttccctttccctcaccactatgtccccattttaccgagacccactgacgacacgatgccgcccaagagaaagcgcgctgaggaggagcaggatgctgtcgagggccattccaccgattcgacgtctggagacatcttttcgacttcctgtcacaccctttcgactccccatgaagacgttccaactccccatgaagacgatccaactccccatgaagacgttccagctccccatgaagacgttccaactccccatagtatcctttcggctggtcacacaaattcagtcgccgacatcctctcgactgatggtgccctctcgactcctctgaataccactttcagccttcgcaagctccccatcgaacttcgcttcctcgtctaccaccatacctgggagcctcgtgaggtgaccatccgtaagccaggtttcaagaacaacttacccgcgacgctattcgtcgacaaggaaagtcgtcatgagaccttgagacattaccatctgtatattaccaagtacatttcccaagtgggacgcatgtatggctatatcaatcccaatctggacacactccatgtccgcatgcctcggacctttccgcctatgcgtcaccctcttgagatatgtatcccaaccttgttggagattggaaagccggtcctgagtgtttgcctgaatccgggcacaatggacgaattgccggccaagaaatggctttttgagagatcggggctcaggggtatcattgcggaggtggatattgctgcaactcgtccacctcgtggtcctaggtacgctacgatataaccaagatctaatagcattgagttttttttcttgcaaagattacaccctcggttgattgaacggtggttgcggatggcttgtctcttgatcagggcctacggctggtttcaggtaacagagtttgagtgatgaatcaatcgatgcgaaagagcaaaagaacaacgaacaactgtgctcaccaagaagtcttctaatacgttgactaaaagtcgatcggctctcccaacaaaacaggctgactttgtatttttctcaattctcacattaaactttccagtctttaagcgtctcagtgatgagaaggcatcataatcgacctaccaagcctggatctggatattgttccataacagccatgaatggatggttacggcgatggatcaaagtaggtatactatggaacgagggattgatgtagtattttttgagcagactacaagggcgttgtttaatgactgcatattggtcaagttggtagcaggcctatggtaggctgggtagagtggaagctgaattatgtgctctttgggtgtgttagtggttatgggatgccccatttgagagctctttaattggtcaaaaggcttgtagtgtaaatacatgcttcacatcaattgtccgggtttttaatatcaatgtgtgaaattctcagaggcctcgatctaagaaaatgcatccctactgcccccttatttgcccaactgtgcatgccatgtgctctcaattaccttttgcattattatgcgattagcaaaccaaactttgtgctctttcacgacattttcgttttcccgctccacttcctttccctttccctctatcctccttttcaagcaaggtgacgagcatagcctagaaagaaagaatggggcagataccaaagcaagagatggagaaaggccccataccgaacaatttccaattgggggcaaagaatcgactatacccaaaccgagtagtaccacaagaacaaacaggctgcttctgtgaagtacgtgggaaggcgccgagcatatcaaacctagacaggggtctattcaccagggaaaaatttgtatgtacatttgtcatgcgctcgtggcgactctttctcccagccagccttgctttacctaggggcggccacgggctgccatgactggatcttgggctttgttctgagataatatcagttttctgcgatatgatggaaatgataatgaacaaagaaagctccttacgtgctatatgtcttgaacgcagctctagtaaaggtcctgttagggatgtgctcggtgttggcccaagggcggttggcaatgccggtggcggtggtgatggggtccttgttgggaggagtgtcgacagagtaggagatccaggcgtgccacaagggctcaatctggccactgtcgcagagcaagttagactgatgttgcgatgggaccattagcgaaacctacgcatcgtagtcgtgcttggcatagtcaacccatctggagcggactgctcaagttgatcagcacttcaaccaatgtatatgccggagatagaagcctagaacatacggggaagttcatccatgttctcgtagaacttgttgccgaacttgtcgacacccacaagagtaccggccttggtgtcacctgcagactacgtcagtctcctcccatccttccgccctccatcgtccatgtgcttcgaggcgtaccgatgtactattcgtcgggggtcgaggctatgttagctgtggctgagtaggcgggggactcgaggaggggacgaacgttgagttgatgccagtattcctagagttgcgcctgaggttagctactgtattcaggtgtctcacgggtattggaggagcaaaccttgaagccaatcttgcgcagattgccgagggttctggagaggtaggacatgatgggcaaaggcgagcgcgggccaattgaccttggctggatgtggtgatggtatcagttgaggattgcggtcgttgcggccaagcccaggcaagatgggagctcgctgccgaactgacgccagtgggcgggattgtggaccggcgactcccgagccaatgggagagctccaattaccccctgccgccaagccccgcgttccctgcgtcagtgctctttttcgagattgtcaacggttccaggttgcaccctatgaacctatggactacatagctatcagctctttgatcttcaccctcttccgaaccgccgtcgatatcaccacctttcttctctccagtccccagcgcttctcggctatgctgaccaggactgcctcacgatgttcgactaagcttcgggccgccctccgacagccatcctccgggttgctaaacaaccaccacaatgccgacgattctcgatgcccacagcaaacgccactcccggcgcgcagtccgctgccacttccagtgccggaatgctgtccccgtttgtcagcgagcttgacaagattgccccatcattcaggatcaacggatcgcaaattcgggttctccaatcgccaaccgagttctacgaaaccctcaaggttgtctagccccgccgccctctagcagtcgttgggctctgactcggaaacaggacaagattcgcaatgcggaaagacgcatcttcctgtcgacactgtacattgggaagtctgagaaggaactggtaggtctttgtagcttggatcgagctttgccctgtcagtatctgacaagtccaagatcactacactccaagaggcgctgcgctccaagccgaacctcaaactcagcatccttaccgacgccctgagaggcacacgcgaagcccctgatccatcatgcgcatcacttctggccccattggtcgaggaattcggcccagatcgcgttgagatccgcatgtaccacacaccgaatctcacaggattcagaaagaagcacatcccgaagagaataaacgaaggatggggtctacaacacatgaagctgtacggctttgacgacgagatcatgatgaccggcgccaacctgtccaacgactacttcaccgacaggcaagatcgctatcacctgttttcgtccagggacatcacggaatacttttccaatttgcatgatgccgtatcgtcactcagctttcgcatcgacccatccgacgccccttccggcttcgacatggtgtggcccaaggacaacgcccccccatcccctctggaagatcacaagcagtttgtcagagaatcaacaggattgctggcaggtctcatctcacccaagactgcgccgctgaccgccaatgactccacgccattggaaaagcgggatacatctgtttacatgctcgcccagttctcgcaattactgtcgccagacacatcgacagaactcccggccatcacgcatattttgagcaccctcgccgccccacaatattccaagtcatcttggacatttaccgcaggatactttaaccctgccccatcgctgaccaagctccttctgtcaaccgcatcgcaaaataatactgttattacagcttcaccgtatgccaacggcttctacaagtctcccggcgtctcaggactgctaccagatgcgtacacactgcttgcccggcgctttgtgcgcgcagttcatgagaagaagctggacgcatctacggtaatgaaagagtggaggaagggcacggttggcgagcctggagcttggacgtatcacgcaaagggtttgtgggtgactctaccagacaacaatggtccatccataagtctgatcggtagctccaactacactaagagaagctactcgctggacctggaagccaacgctctcatcgtgacggagaatgagagtctgaagaaacaactggccaacgagcaaaattggctgcaagaaaataccacggtggtcacccgagaggactatgccaagactgagcgccgcgtcggtctcaaggtgcgcattgcgatgttgatcgtgcggcttgtgggaggtgctttgtaaggaactggtctggtggagacttgatgtgtaggactggtgtaagaataggagaggcaaacgatacccaagaatacggatagaaggatacttcagcatcacagttcagatgtcagctgtttggacggatggaagttttatgttttgttcaatgctgagcgagtgtgcccatcagactcgagagtctctgtcgtcacgccggacgatggggtatgtatgcaaaagtcaccacatcttcgatcctcccgccccgatttccgacatcaaaatgcgctgcaatgcaaacctgaaaagcagacaaccgataaacgccgttccctaatactgattcgcatctaaatcatcccggacatgacaaacatccccatttttgttggaaaatgcaaagacaaaaaagatcgtctcccgaaacgcccccccctgtaagtctcatgcagtccccattttaaagaacgccggaaaagtccaccacaatggcattgcgccactgagatgattttttggaggatgctgttaacaagtcgaagcttttgggaccgatcgtggggggtccggcccgacagcttgggccctgctgacctgactgggccgccacgctacatctcccgaaccaacccccaccacaagcgttccagcggtagcttcagataatcttcggtctatctggtggttgtcgttcatcctcacaagtcgatcggcatcctgatcttggcgttcgtcgtccatgatcttctcctgcttttgacgagggggagcgctcgctggatgactctgatgaaagagcgggagaggctccgcttgagggggacggcttgcatcatggtggttttgttgtagatatggttggaaggaataggtcggccagcgaggtatggagtctccaccggagagatgaggaagaggaggggatatggcagctcctgctggaccacttttggttctcagttttgaaagttgatgatcgacatgatcagaggtggtcgccaggacaagagacgaggaggtcgtcgagtcttaagtggtgagtgtggtggtggtagtgttgttgttgttggcggatcggagtaccggcgaacgacccattcacctgtttcccaagcaaagaggaggaggaagagcaccgctaaaattagggccctgtcgcgggtggcgtagtctgttgcgtccgcgccccttttcttggttgtttcgttttgcgggatgtcaacgcagagataaaggtgctgcgccgctggcgtgctgtacccacaagacccagcgatggatatgaaacggtttcgactgtgcaattttgtagttcagccacaaaggttgttctgggttggggtgaaaggtcctagatagggctagggatctcaaggtattgctggtgggcttgaggcacaggggagctatggcccttgatgaggtctgcgggatcacgcaagagggggcgcgttgatatgcaaccttgttgcccttgccagtgcggtagtggaacggctcgcatttaagatatgagacatgttcggagttttaacttttggagtttcttatcagggccattctcgcgggccgaagcttttggtggatgacagaccaccgttatcaccgatgggctgtcgcgggtccgagccattttccaacctcttcccttccccgactcgaacatctgagggttggtcaagatcggggatctgggaagccaagtagaccaatgtgtgtatgagcggcttctgctcgagctcagacgcttgagcttccaacgcgtcgacgtcccaacgcccccggactagccctgagtcaagaaacgtgacttcggggctggcggcccagacggcgaaggacccgcatgagggcgggatataaatgtcagcatgttctcgatatcagtccttgaattactcacagaataccacctctcacacaacagcattaccgtgcctgccaaccacaacattcttccacagcttcgtgctggtgaatgtgcacctgaatatcgtcaacgtagaagaagatgattgcttattctcctacaaccagagccaagattgctcgtcttgtatcagttatggcaaaacatgtcatcatcttcttttacgtggacgatattcctgtgcccattcaccagatacggacgttgcctcggtatatcgtcgtcttgtaccatggttctgtgacctgggattgggcagatcagtttctacacggttgtcgacatcacactcaagatccttcatgaagcccaggaagatgcttcacttgtgtaaagtcccttgcaaggcatgtgatcaatacatatccctacttctaatcacacttaactgtgttgtaaatatatatctaaaatctaggtagttatatgcatccatctacaattacacaaccccctcatccagaagaaccaatcgtcaccctccaaccaccccacatcgccacccccatgctcaccattatacacgccatcttctcataccacactaatccccagtggatagccaacaccttcgccacaaccccagccacaatccccatccaaacaataaagaacccaagatcaaaccacgccttcctcatgccgtccctctttgcccgttccatatccccactcgccctcatcgacgtcccccagccatcagctgccatggtcagcatgctgtaaatctgcaccgccggcaacgggacgtagtaaaagaacacacccggcacgatccacctcacatctctgagcctcaaccggtgtgtgttcctcacaaaattatacatggtgctaatcaagatccgaaagacaaagtccataaccgatatctcaatcaactggtgcccagtaaaaaagaaccacatcaccgccaacgctccgatcgccggtccaaactcccgcttcaccatcccgtagaacagaagcggatgactgacgagatagacctttggcctgagaagcgactcgatatgcgttgccctcgcccagcggacttgttgtctcaaccatcgagacattgtggtaggggtgtctgttgcagccaggacatcggaggcaaagattaccttccatcctctgagtagtaaattagtggtgagatgcctgtcttcgttgacaatcatccgcttgccaaaggcgatttgcgtataccacggcaccaggatcgccggaagggcagacagacgaaatgcggtgctgggaccagactggcagtcacttgtgccggtgcaagctggtgttgagcgggtgaggtagagctcgccccagtagaccgctgaggcgaggtttgtgacggcggtttctctgttgttgtggacgacaagcccggaggaggcaccgcctgctttgaggtcagaagcgatggtgttgattgttttctctaaggaatctggaaagacgatggtgtctgagtcggaggaccagaggtactcgatgccgaggatgtctgagatgacaagtgcaaagacgtaggctgtgaacattattccctttttgtgcatatggcgttgcttcagacagagatgtttgatacccttgggaccgccaatggtcaggtcatgttgtcgaaggatcgatcgggctaggtcgagacaagcttgcatggaaatggcatttgcttcgtcttcgttgacaggaattccgttttgacgctggagagccatggttttggcacggatgcgttcagcaatctcacccaagggctctgggatctggatgacggtggagttctcgggaaagacttggcagaagacgttgaccatgtcttggtcttctgcctcgtcgccgtcgatgcctgcaaggaagaaggtacatgtcttggctgacttgtagctttgcagtgcccgggcatagagcgatggatcctcacgccagccaacaactgccgccatacagtccgcgttggggaggcatggttgagcttccaagtgacgaccgctccattctttcttttcgtccaagtgttggtcgaagctcggtgtatgcagggaacgagcaaagtcttgtcgacgtccttcgacgatataacggttgatttctgtgagagcgatagtgatgacgatgtctagcgttacggggtagcgactgtggactgttgagaagtagtagatgggtagggataataggcaacccaaaatattcagaagtaaacgagaggctgaagggggatggccttgcaccactggctcccggaagtcgtcgttcttctcctttggtgacatcattggatcgtcaaagcgagtgatgctggccaacaagaactcctgaaagaagatgtgtatcgtgaacagaccaggctggtcagaagacggaggggatagcagtacaaaagggagagagcataggcatatctctacatctaagctgtgacttaccgtgtcacaccgtagaggccagctcgtatgcctgcctggaatccgacttcggcttcccctcttcagatgacagaatctgtacagaccccgtagctggtgacccgggaagccatcgtggtcgtcaaattaggacttgcccggtgtgtgagcaagtggcggctctggaggctgcaacgtcccattcagccaagatttcctatgtggcttcacgcggctggtttgcgtcgtatccatcaacctatcggtaaggccttttgctgcgccttattccaatgagccgccctccgaagagtgtgcttccagcccttcttgaaatcggcgaatccaagagctggctgctttgtgcacctacagcttttactgtatgtctcgtacgttgtggaggctgtgggcacgagtgggagtctgtccaaaggttgctcggtatccaattgtcgggtattgagacattgaacaaagaggcaaatagagcattgtggtatggcggtctatttttccagaagagcatcgtgacagtgtccggtggaaaagagcgttccagtttgcgccacacaattattgtgggaccgaggacgacctctcagtgctcccggctcagcccatagggcatttagggcatgttacattggggagcacagcgcatttagccgcagttgcacgccgaaccctcggcgcactcaacttgtagaaccaacagcccatgagcacggtcattcgtctgggatcttgatcttgaatcctggtgagtcagaactttgtctcaaccttatgcttatatggcaagctaaccatcatcagatctcaaggttgtattcggatcatgtcctgagcctttatgcgggctgcgccgtagagtcaacttcaacatgatcctcggaatcccgaccaagagtcgctcgccgcctattcgcttcgagtctttgtgcaacacgtcgtatcggggtcacagcctccacaaaaaggtcggtgtatggggacattcagctcactcgaagctgcttgggagcgccatggatgccttggttggtcctggtccaaagactttagactaaatattacttcgactgatcttgagttcaccgcctagaggcttttaacgagaacccagttttttctgtttgtccaatttcaacatccaaacctacgttactgaaccagcatcatggttgtgacatacaggaacaaccggctggtgccagctatcgtgatatcagcgtgcctctggggtatctatcatcttgtcgatgtcaaaattccaaacgaaagctatcatagcgtcatacttccagactggagaacgccaccatcacaagtcggtcatgatgtcgaccttgatccccattcacatccaaccatcacggcatggtcaccaccaccaccagcagttcaaactcctgatccgacaaagagcccaaatggcaagcccaaagacagtaccctggcaccagaaaacgtcctcttgatcatgaaaacgggctacacgtctctttggaaacgtcttctaatccacctcaccacctccctctccccagaccgcatcccccaatccaactcggtcatctactccgacgccccctccaccatcggcaccttcaacatcatcgacgccctagaaaacaccacccacaccctcaaatcgaaccatcccgacttcgaaatctatcgccaacaaccgctctacgacagccacaacgcctacgtcgaagcagcgggtatagaaggcgacaactttggccccgcgggtggttggatcatcgacaagtacaagttcgtcccgttgatgcaacacgctgggaggaactaccccaacgcgaagtggtatatctacatggaagacgacacttatctcttcctcactaacatccttgcctacctgtccaagtatgactggaggaagtcgcattacctgggcagcttcgccgggaagtcggacgtaattttcgcccatggcggtgcgggctttgtcatctcccgcggagcgtgggagaggtcctttgggcaaaacgacaagatggccgcggattacgaagaatacacggccgcccactgctgcggtgatcaagtcctgggtcacgcgctcaacaaatacggggtcaaattcggggagaataatggagacgaaaggttcacctggggcttcaaccctgttgtgcactggcgatttggatttgagaagtggaattggtgcgagccgttgctgagctggcataaagtccattcaagagatgtggcgagatattaccagttggaacaggagtgggattttgagaaagacgggccgatcagacatggggactttgcggaacgggtcatccttcctgagttgagggcacggaataatagggcggagtggtgggataatatgtcgggggggtggcaggttagttcggggaataagaatgatcctcctgggccggaggggaaggggtatgatgaggggaagtggaagaaggcctgggagtcggtgggggattgtgaggaggcttgcaagtcgtggggggattgtgttcagtggagctgggtggaggatttgtgtaagatggataataagttcatgatggggcaggggtatgcgccggctatgatggagaggaagacggcgttaaagaggactagtgggtggttgacggatagattggagggctggaaatgtgcataggttgttaaaaagccgctgttttctttactttaggaattatttgagagaatcatatacagtaagcgtatcgacctcagatctgttcttgaaccctctgacattcctcttgtattggtgtcataggtcactgccgctgttccacaaacgcttatgggcccgtaatgcaacgcctacctaggtagctcgtgttactcagagcagattccgggtcaatcctttagatggacctaacgcaattctagaagggacaaggttccaacgatgatttctgtgttacacaaggatgaaatatgaccggtgattgctgtctcagcagtgacacagagtcaaactgcgttgtagtgtatgttggattaatcaattatttaatatagccgccacgaggttcggcaatagcagattatgtctgctacgcctccccaaacagtgctgtctataaagagacgctatcatcccgttgattccataattagtctagagcttggccttgacatttcgctagccagttagccttcctcgatgatcatcatgaagctcctcctcacgatcaccggcctcgcagccctttccaccgcaacaccaacctcgccttccacaccaactggccgcattaaggacccctggggagacttgatgaccatcctgggcttctaccaacatcccgaatgcagccatgaagacccttactggtacatgaccaccaggctcggcacgttcctagccgtaatggacgagacggaaggctgccagaatgtgccggacgtatggggcgatgtgagagtcatcaaagtggagcgtcaagataggaagtgcaaaggtaagcagctatttacggcctctgtcatctcaagtgcggcacagaggtaatttacatgcccggttttcagtaacggtgtataccaaccccgattgcaatcctgccagcggaagcgggatccctattccagaggagacttgtgttccctccgagccggaaaagacttggaagagtttcgctatcagaggctgtttggattgaggaacatgtggcttggttaccagggtggccttcagagaatgtttatacacagacaatgtatgaaactgcgttacaactgatgtcgaataggcaagaacgacattgaaaacaagctccaggcccccaacgtagtcgcacaggtcttcatgattcaccattgatggatgcagacaagtcctgctttcggtctacatacggaccgcgaatgtaacctttaaccgactcgtttcgcccagactttcttccggctgaatccttcaaggggacccaagcacgttctaacatgaacgaagcttgaatctgatatgtaggtaggtagcatctccatgtcaaccaactaccctaagtggctgatgaccaattctgtaacggagggagagcctagaatggaagagtgtgttgtagctggtatcctgagagctgtctatttttaacataagcccctcacaaacatcccgtcggcgttttgcacaatgtccatgctaacaatgaccagaggcagcgccgatcataaatagagaattctgccccttccataccatgaaattcacaatcaggcagcgttcacaaatagcaaagttattcatctcattcagcatgaagtgtctcctcgcaatcactggctttgcagccctcgcgatagcaacaccaactctgccacgggcaccaacgccaacaggtcaagtcccctctccaccaacagtggcccagcttggcttctaccagaacccatcgtgcagccatacaggcacatactggtactttacctactggcgctcacagtacgaggctctgctggagcaaactggcggctgccagaatgtatctgagccaatggggggctacgcgacggccattcaagtggagcgtcaggttgtggagaactgcaaaggtatttttattctcttctgtcgctcgcatctccaacctgcgaaaggttccgcactaggtaccgtaactaatgcggttttcagtaacactgtattccagcaaggactgcgatcttgccagtgaagccgtcgttgcgattcccgggccgatggtttgcgttcctgccaaacagggcagatcttggaacagttattcgatcagagaatgctcggattgagaaggacttttttcttcgtggattcagggggtggcttcaggggttgaaaaggggggctcatagtggggccatcaagccatgatgacatgacgtcaggctcgtcttgagatgtctgtctctaatattccgttcgccattgtcaaattgtcaaaacggagtttacagtctttggatgtcgaaaaggttctttttaactccactcgaaatgttctaacgccgatgatgatgccgtgagattttgatttgtcacaatcggacctgaatccacccgcttgctcggttctacatatttggctctccccgcttttcttcttctttccagtactgttaatgtgacgtttgttgatatcatcatctgagaaatttgcatacaacaacttatcaacaccgttctgcttgaaatattagagaatatcgttcaaaatgaccgccggcaagaaatggattctcacaggccaggaaggttatgatacctcccttcaactggtcgactcggacatttcgaccgaccagctgggaccggatgacgtgctagtccagcttcaagctgccagtctcaactatcgtgatttggtcattgccaaaagcgatgttagttttcgctcccaaacaccaccgcgtaaagtcaacactaacttcctgacagggcggagtagccggctccatcacccctaacgtcgtccctggctccgacggcgctggcatggtcgtcgccgttgggtcctccgtgactggtctcggcccaggcgacagagtcatcacttacctcgccccaaccctcccaccatcagatgaaaccgccctcccaggcgccgccgagatcttcgctggtcttgggcagagggtggacggtaccctcgccaaccagatgctcatcacccagcatggcgtcatcaagggcccttccaacctgacgcccgtccaagccgctacactgacctgcagcggtttgacagcctggaacgccctctttggagtctctgggagagagatcaaaaagggtgactgggttcttgttcagggaactggcggtgttagcatcgccgctttgcagtttgctgttgctgttggggcgaatgtcattgctactacttcttctgaagagaaggcggagaggctgaaggagttgggggcgaggcatgtcattaactataaggagacagaagactggggtgaggcggccaagaagtacactcctggtgagaagggcgtggatatggtggtggatgttgctggaaactcttctttggtgcagtcgctggcggctgtgaggacagatgggattatttgcttggttggattgcttggcaagttcgatgctggtacaatcccgatgatgtctgcgctctggaggccttgtatcgtccggggtgtgctgttgggtagcaggaagcagtacaggaatttggtccggtttgtggaggagaaggcggttgtgccggtgatggatgatgtcgtgttcgggttagaagacgtcaaggaggcgtacaagaggatggaggagcagaagcattttagcaagattgttatcaagattgaggagtagtacttgggtacctatagagttgttatctgaatctacctacaacgaacattgctgaatgttgttggtttggcaatttcccgatggattgcgaagctgaagccggcatgcgtgatccgaaagtgtaaatcgcatgggtgtcgtggtgtagtccgagggctcgggttagaaaacaaggtcagcagaaaaagctaacccagttttgcaggtgaagcctaacgccaagtgaacagagttgtattcacacagcgtctaagtggcctaccatcaagacaaccagaccagcactttcgaaggattttggttcaaccaggaactgaaagctgtcgccctatgctcagcttccccagagacgtcggtgaggctgcctgagcatcatggtcactgatatcatcgtcatagcctcacattgatacatcaaaatggactagagcttcttggcttcttcatcggtgaagagactcgaaaccacgttggtcaagtataaagatcaatagaccatcccgccatcaaccatcttcttcttcaccatcaaacaaagactttctatcactgcaaagcatcatcgcatcgttaccaacacttcttctctaagtctgcaatctcagcaattcatctcttcaccatgaagctccaatccctctgcgccatcaccctcgccaccctcacccccctcgtcaccgccaacttcgacatctacatggccgaagaaaagaccaccgtcggggggccccaggtctggcccatgtggcacatcttcgacaccgatcccacctgcgacgaccttgccgaaaaccccaactacctcggcagcgacgacgtctctggcaacaaagtcggcgtccgctgcgattcttcctccgatcccttcaactgcgctgtccagcactaccccgctgacggcattgacgttctcgagatgaacttccacagtgacccccctgtgtaccactggagtaagtgtggtccttccccccataggtagcaacggtgatagaaaacagaggcttacatgacgatggtagctatttacaaggatcgcaactatgacatgtacggtcttgatgggaatgtctatgggaactgcttcccctttcctgggtttgagtacgagtgcggcgatcctatccttggcgggtttactggtacgcgcaagtttaggtgcttgaccgaatttacggctgcgcagatcaaggctgcttggggtaccaagaggagtgttccgtttactttgaaggaggcggagggggtgaagggtcggaaggtgcagaagtgggaggcttgaaggactgtttcggctgtcgttgcttttctgctttttcgaaggggttgaaagacttggaaggggaggatcgtctgttgattggtgtttgattattgactttttgatggggacttttgattcttttttgtttctgatattggttgctgtttcttgatttacacgtttcttacctccatagtggaaataactggttattagaccacaggtactggtattaagtaggtattcaaacgtttggcttcataactgtgtggtcagaactatcgaatgtgcaataccaaccacaaacttcccagaccaagacaatcctctgttcaaatactggaatcttacctaacaagctgtgaactgagtaactggcagtccaaaaagtatgaagcatacctcgaaagataattaataggccttaaaaaataattcgcaggcctcaaaaatccttaataggcctcaaacaacagccgaaaggcctcagaagatagtaggtaggtttgaaaggatagttaggagccctgtaaagagagtgaagatgcctattggcttttccacatggcataagttaatatttatcatgcctataactgacttgcagcaccatatatcctgtccacgacatgcctagttgatgctaggagccctgaaaagacaggaaaagggctatttgcattttcgaaaggtataagttgatagttctcatgcctctaactaacttgcagcaccatgaatcctgtccacgacatccctagttgatgaactgctcagaatcctctccccacgacctccggccccctttctggccatgtacgccccccccccccggccaaccaagtcccatcctcctttctgatagctttggtcaccatgtcctgagcccaaacacgctctttccgcccctcagcgttcagcgctgatcattgagatggaggcagagagggcacgggagtctaagcagaggctagacgaagaagaaaagaacaaggaggctgaacaggccagcaaagaagagcagtcgcgaaaggcagaggaggccggccagacgagggtggaatcagtgtcagagaaagagccactcgctgccaaccgataccattcccaagactcagccgactacggacatccagtctgacatccaatcagacgtcttgaagggcgcaataactccaggacctcgtcaatccagacaccgagcggtggaatatgtcaatggcttggtaaaatcattcagcagcacaaagaagaaaatcaagcatgtgatggggtgatgagttcgacattcatagagacagttccatcaatatatcctccccctttaccacccctcaatcctccccgtatactccaccaacctacccccctccctctccctcgtcgccccattcaccaccccaaaaaccccatcaaccgactcctcaatctccaaattcgcctgctccagcccaaaagaacgcgcaccatgattccccatctcagtccttacccaccccgggtcaataataaaagtaaccaaccactcctcctcctgatgaagcttcatcccgtaccagttcaacatcgtcttcgtcggcgcatacgccgcgctcgggatagccaatccaccctccaacaaacctgctcctgaccccatgaacgcatagatcggtttcttctccggggttgtttccttagcagcgaggagcaactcccgagtggcttggaacagggagacagggccgagaacgttaacctcaaagtgctccctgatgtcggcggggttgacgtccttgatgagggggtagatcttcgcgatgccggcgttggcgatgacggtgttgaggtaggttattttgtggtcgttgacgagaattttcactgcctcggcggcggagtcccacaccgaggcgtcgtatgggatgagaatgacgttggtggacgagtctcttttcagggtcttcaaggcttgggagctgggggaggagggattgcggacgaaggcgatgacattctgttgtcgttgttagtggctgactacagaaaaataaagagggaaatgcgtacatggtcggggagctggaggtatttcttgacgaggccgagaccaagaccacggttggcgccagtgatgaggaagttggtgggtggtgacatggtgtgcttgggatgttgagccccaattgatgatgatcaagtgagatctagtttagtggaccgagagtgaggaatgtgaagttgttgatgctgcattcaaaagttgagagatgaaacttgggaatatttatatggcctcggaactatcgagattacaaattctgtcgaggattacagcgggtcaaggttgataaggattgtacgacaagttccattggtaatccagggcccggtgcacaccattacaaagacgtctccacggcaccgctgcggcacagaacttgtgctatcaccgcagttggccgtggggacggaaataacattccagagaatgcccaactcccgagtccaaagcaaactttgttgggtgcaatcatgttgcataattcaatctagatacccttcatcttctcccgcataaactccacggtagcctcccaagcctcctcggccgccttgaatccaggcactgccgtgaaggcatggcaagcaccggggtagatcttgacgatagcttcgctcccagttatcatccatttcatagccatcagcagagtatcatccagcaatgggtcctcggtcccgcacaggaacaatgccggcgggagcttgcctcctggtgcaccctttgccaagcccctcatgtcgccgtagatgggcgatatctgtgggtttcgtcgcgcttcaatcgtcgtgtttggggcgtaagccattgcgaaccccaacatctttgcgttgttgacaagcagccgtcgttcgaaggtggtcaccatgggtaagttttgggtaacatcaaaccaaccataaggaaggatgaggccggcaatcttgtggttcgggtgggcgcgtaaaaggtgaaaggcggttgttgcagccagattacctccagccgactcgccactgatgaagaggagcctggcaccaaaaatatgttcacccttgtctacaagatattcggcagcgtcgatgcaatcatggacctgggcaggccaggggttttcgggagcgagtcggtagttgacagaaagcgctgtaagctggaaggtgttggcgtactctctgagctttccatcttggctgcgcggtgttagttaagtgtggatggtagcgaggaagtggaaaaggctcactgttggtgtgtgcccattacgaagcccccaccatggatatggaggaagagtcccttgctgggctggccattatcgggggtgtatacgcgtaaggcgatatctcgacctgcatctcgtgatgagacaaccacgtccttcgccgccgggaggtaaaccggggcagcgaatccggtcttgccattttcacgcatctcacggaacttcacaggaccgacttcttgccatgttgggccactggaagtcgccctctctatgaagttgttaacgccgattgtctcctcgctcacattctccaaggagaacttggaggcgtcgatggtgatatcacttgtcagcggcatggtcatagttggaggaaagtgtgttgtgtgaattcctgagatatctatcaacagccttgggcttgccagttaaatacctgcgcgacgtgaaggaggggtaacggtaaccgcgatctccgaggctactggcgctacccgaatgtgaaccaacaaaggtgaaggaatcaatattgctctgcgagtggaacgacatattaggcagacaacttgcttaaccccgcatctcgatgtctttgggaaggaaggtactgttcagccagccccacctagctgcttcgacacacactatcagttacacactatggatacctcgaaagctgctcaacaaactccaactcatggggctcccctgacttttctcctccggctgaaccgcctttgagctgttgccgattccattggccttcaaccattccggatcgatattctcgaggctcaaatgcggagcgacgtctgcaccgtttttcggtccctgtctgtcctgcatcgtccagcccatacccaggtgtgcccaggggttcttgtccatgtactggaactcaaagtcctcatagcgaggttgctcaatgacttgctggtaatggagcgaagatccgggccagatggcgttgacacggccagtttcgttgttcttgtaccctgtcgtgtgacgaactgtcagtaccgtaactaattgagtatagatgtccaagaaaactcacagctgcgacattcatccgcccacacggtgtgtttcacccactcctgaacatgctcgttaaagctgtcagtgatatcttgcctcggtacccagctgcgaaggttctcattctgcgtcttcttgatcagcctgatcgcgtagtctgacacggaatgcaatggcgccatgacgctcccgttttggataggccaagttggtccgatgaaggtcatgaagttgggcatgtcgggtaccgccagcccaagataggattcgggagcagttgcccacttgtccttcaggtcaacgccattcttgcctacaaccgggaacagaggccgatatgtattgtcgtagccagtggcacagacaaccgtgtcaaccttgcgctcaacgccatcggcccccaccacaccgtcttctgtacagctgaccacagcggtaaagtgtacatcgacattatctttctggatggcttccatgtaaggatcaccaggcgtgatccttcggcacccaaagccaaacgtgggggtgaaaccctgcagcaaacgttgatccttgataatttcccccatacgcttgcggaaaaagccagacgcccccttctgcgccatggaaccactgtagaaagcgccccaggtgccattcacttcgctctcgatagccttggcatgggaaacaagatggccggggttccgtctgaactcgtcacgctcctgctgcgtgtagatcttggatggcgtgcccgagttgccggccaggactccaaaccagatacccgtccggacaaaaacgtcgaggtgctttgtgtaaggctgcatcccaggaactgtttgaaccgatgatgcgccggagccgatgacagcaacgcgttcatttgcccatttgtcctgctggtagtcctcgggccactgtgcggtgtggactactcgtcctttgaatgtctctgtcagaccggggacatcgggccactgcattcctacttggttaatttcctctctaacccgacgtaacaaagatggagccgtcttacctttggagtgctcaagacacctgtcgcatgcaacaacacatggcaatgatcctcaaactcacgaggttcttgccctggtatttgctgccgtagcttgacggtccagattccctcctcctcacgccagtagcagcctatgacctcggtgtgaaaggacatgtatttacggagatcaaaagtcttgcagaccgtgtcgagatatttccacaaatcatcggaaaaggcaaaatatcgcggccagtccgggtactataagcaggcacccacgttgtcagtttcaagcaagacgggcttggaagcaaggaccctctcaccaatgcaaattggtacgtatacgcatgacttggaacatcacagccggcacgtgggtacttgttggtgagccatgttcctggacatcggttagttccgaggccggatagggtagagaagctgagtctgacctccaatgtctcggttcttctcatagatgacatgttccacgttctggcagtctttccggatacgatatgccatcaaaataccagaaataccggcgccaatagtcaagactcgcagtttccggttctgagggtcgttccatgtcaggtgttgggggatgttgtacaccggcgcctctgctgctggcgctggcgagtggttcggctgttgaccctcgggggtttcttctttcaggtaaggggccatcgaaaagtctcttgacgaatctgtacaagggcattgttgcgttcatcttgggccggcaagctgctttgttaacattttgagatcctgccttctcgcccttgctaacggaaagcgggccagcccgtgtcggcccacgggcaaagttcagctatcagccggtcaccgaaccttcggctgcatcttggtgtggtcacacaaagatggcaacaccgcgcctccgcttcggctgacataaggtagctggcgcattcaacaagaggggctttgcaacaagggattctcatgcccactattcacttcacaacacatctaaccgctaccttactcgttcaacatcgcagtcagcaaccatggccgtgcccccagctcccaagccccccagcctcctaggctaccaccgcatcctctcccccttggccggcgtccgcgtctccccgctttgcctgggcaccatgagctttggcgaagcgtggaaaggccgtctgggcgagtgcaccaaggacacagcctttgagatcctcgattgcttctacaacgccggcggcaactttatcgacacggccaacttttaccaggatgaggacagcgagaagtggctcggcgagtggatcgaggctcgccagaaccgcgacgagctcgtcatcgccacaaagtataccatgccctaccgccttcgcggccatgagaagatcaagtccaacttccagggcaaccaggtcaagagcatgcgactgtctctggaggcgagcttgaagaagctcaagactgactacgtcgacgtgctgctggtgcatatatgggattacaccaccagcgtcgaggagatgatgcaggggctgcatcaccttgtttcgagcggcaaggtgttttatctcggaatcagtggcgctccagcgtgggttgtggtcaagtgcaacgaatgtaggtcctcctttctctgacacaaaggtctacgcccagcttcgagctaaacaagatggaaaagatgcccgccaccacggcttgacaaggttcagtgtctaccaaggccattggtcctgcagcttccgcgatatggagcgcgagatcatccccatgtgcgagtccgaaggtctcggcatcatgccatggggtgttctcggtcgcgggcagttcaggtcatccgaggactacgctcgcgagggccgcaagatgggcccccaggacgagacgcatcgccgcatgactgcgaagctgagcgagcttgctgagagaaagaacacggttccgactagcattgccctcgcttacgtgatgcacaaggtgccctacgttttccccgtccttggtggtcggaaggtcgagcatctcaagagcaacattgaggccctcagcatcgagctgaccgccgaggaaatccaagagattgataactctgagccgtttgatcctggctatcctctgaactttttgttcgagaccccagcgcagagataccggttggatatgtctgcgaggcatatttggcagttgacatgcaacaccaggttggagacagttccaaagccaagagtgagttattcatgccgtttctcaaccgactaaagagaagttactgactgttgatatagcccattgaacctaagcaggggatgaaacagtttgatttgtagacttggattgggaaacgtggacaggatggagcacagatcctagatacttcgatgattgaaaacgcaatatggtattccttcccagctgaacgcaaactaggtacgagcagtgtgacgtccactcaaagccgtgtggtggcaattgtgacatgagtaaattcatgaacatgttccatgtccagaccgtctatagaaataataggcttgcatccacgatgggcctgacaacaaaagtcgattgcaagcgagatcctgatgtcggcggacactccccgataaattgcctgatgcagaatcatatcgccgtcctgtggtcggctttggctctgaagcaccccgagcggtttcttgagccagtgaactctcgaaagccccgtcgtcgtgaatcggcccggtcaccaaggcacacaggttcccggcaccggtgcccgaggatgtacgctgtgggtcgtaactcaggcaaggctataactctctgacttcttctaatcaacttgcctggtacactcacctatcactttactcatcactctatctgccactctatatttcccaccacatccacgccacaatgacggaaaccaccccaaccaccaccccctcctccccaccatcatcaccaaaagaccccttccgcctcgacggcaaagtagccctagtaaccggctccggccgcggcataggcgcaggaatagccctcgccctcgcccaccgcggcgcaaagctcatcatcaactacgcgcactcatccgcgccagccgaagccctcgtctccgaaatcaaagccctcggccccggctccgacgccatcgccatcaaagccgacgtctctgacgtggaccaaatcacggcgctcatgtcccaggccgtcgcccattttggcaagctcgacatcgtcgcctccaacagcggtgttgtgtcctttggtcatttgaaggatgtcacccctgaggagtttgacagggtttttggcgtgaacacgagggggcagttttttgttgcgagggaggcgtatagacatttggaggtggggggacggattataatgactagctcgaatacggcgagtgtgaagggggtgccgaagcatgctgtttatagtggttctaagggggcggtggagacttttgtgaggtgtttggtatgtttttctttttttttttttctaaattcacaattcacggacaaggatggggaaaagatgatgttaacaactgggtctgtcaaggccatcgactgcggagacaaaaagatcaccgtcaatgctgtcgcgcctggggcgatcaagacggacatgtatgctgctgtggctcgcgagtacatccctggtggggagaactttaccgacgagcaggttgatgaggtatgatattcctttcgctctctgtaacttgagttgtactaatcccatttcttctctctcaaaacagtgtgcagcttggctatcgccccttcagcgggtgggactgcctgacgatgttgcccgcgcggtgtgctttctagcctcggacgctgccgaatgggtcaatggcaagatcatcggcattgatggtggtgcgtttaggtaaccgagtcgattgttggtcggggattcagagattagtaagggtgctgcgcgcatttcggtcaccgaagggtggtgtgatccccgagtagcaggatcacaccaagcttgaacaccattcgtgcccgcatttttaatgtgttctcccttttactttcagaatgggaactttgttatgttgcatttctgcgcctatatgctcgaaatatccaagaaatcggttacaatgacatacgtacatagcggcaccagattatgacccaattgtgccccaaacccgtcgttggacaagactattcacaaaggggcttgatcattatagataatcagtcctaccaaaagcaggcgacgcaatactttgccatttatctccacacggtgatgatgtcacaaagccaccttaaaccccctaaagcacccctgaacccctattcacccctcttcccaggaggaacattcgccatagcctcctccgccaacaccggcctccccgccacatcagaaaaaattggctgctcataaacatgtaaaaaccacttcgtacacgccgggtgtgcaccccgccactccccgtccaaaaagaacctaaatgccccagcaataatccccgcgacaaacagatcagcaagggagagtgtttccccaacgagataagaagtcgtcttcgcagcgaggtggtcctcgatgatctgaagcctcttgagtgttgcttgcctgttgagctcgacttcttcctgcacaaagggtgagcgaccgatcaaggggttgaaccacccgccgagggaggggaggatctctgagttggcgaaggacatccagcggaggatgctggcgtggttttcggtgttgccggagccgaggaggggggtggttttgtcttgggatgtgactgcatatgagggttagtaacgcgagagagagagaagatagattgggtgagagaatgtactgtagatggcaattgctatgcactcggacaggatgaaaccgtttgcgccgacgaatgtggggattttgccgagggggttcagctttaggtattcttctggcgcctgttgggatgaggtgattgtcacgaggtccagtgggaggttggaagctttggcaactgccaggatggctgttgaacgggggttgaactgtggtctgtgtcagcgttgtggtttgaaggtattgcaagagatgaaccatcatacagggcgcgtgtacaggataccgaaggccatgatggagaagtgtggttggaaatgctagcaagtcaggtgctggcaagagcgcttccagggtgaatggcttagctgcggaggatgcctaagcaagacttgatatcaagtatgagattgatagctaagctaggtagcctgggcacattcttgttcctatatctattggtagatgcagtggtccccgattggatcagatgccgactgtctcgttccgacatcccataaccacggccctcaagctctcccggtccgtgaatatatcctcatcctcagcaacctccggcagcgacataatgggtacgaaatctctaaatgcctcttcgctcgcaaagtttataatggcaaagccatcaaagttgatattttcgggatttccgaccaacatgttcaaggggtacgtagggctcgccgaatcccgagcaagatagtgacgggtgtgagacaaggggaatcgggggccggcgagagactggagcagagggacatgaacattttcccagtggtccttgaactgctcgggtgatatgtctgacttgcgggtaacgaagatgatgattgtatatggcttcgagctggaagacatggcggcggctgtggaaagcgacgagggctcaaggacctgatgcggagataaaaattggttgaagaaaaaacgcagtctccttggttttgtcccgaagtctcggtaagtgcctgcacgtcttcggaagccgacctgcgccacatgcgcacagcagtcggactttgaaccgaaaggtagccaccctgtaccacccagagattacatttgttctacctagggtgaaacgtctagatcgcgagggcattacttttcacgttaggctgggagatcttctctgatttgtccggtgaaacgaccatcccacaaacaatagtaatcacgatgtatgcatcacaggtttttgtgcttggtgccataagtgccctactcctcttcgtaacgagattctatgccgctcgcaagcaagtatggaagctgaagagcgccaatctcgtgagttctggcctgacaccacgccctgcccagtaagctaatctgttttggcagccaatgccagagttcaatctcacgtctggtcacttcctggctttgaaggagactgtcaagactcttccgaaaaacgcaaccctgcacacggtcatgatgcaactgtcaaagaagtttccctccggaatgttctacatcaacatgtggccttttagcggcacgtggcttgtggtgacgacgcccttgggagcttcacaatgtcaaactctgaatcttatcaagccatcgattctcacaaaaccactggaaaccatcggcggtgggccaagtctgatcaccatgaatggagagacgcataagaaatggcgtagtctattcaacccaggatttagccccagctatctcgtggggctggctccgatgattgcggatgaagtggctgtattttgccgtctgttgagggaacaggctgggaacaagaacgcggaggtgctaaagttggaagatctgacattacgcctaacagttgacacgattggagccgttgctctgtgagtctagcaaaggttattaccacagagccgaatgtctgctaatggccatgcgtgccccctgcagagacacaaggctacaccatcagacaaaggatagccaacttgctctggcacttcagcggcaaatcgaatggacatcattcgggaccacctttaacccattcaaacgctacctcaccatccgccccttggtgctgtggtacaacaaccgcatcatggatcggctcattggccaggaaatcgacaagagatacactgagcatctgcaggatcaaggctcaggtgaaaggcgctccaaatccgtcatgtcgctcgtgctggctcagttcctagaagaagcccaagtcaaaggcgccccgccccctctatccgagttcaagaaactagttgcgccccaactgcgcggattcctgtttgctggccgagacacgacgagtagcacccttctctattgttttcacctcttggctacgcatcccgaagcgctcaaaagactccgcagcgagcatggtgaagtctttggcgacaggctggacgcgtcaaaagcccaccaggccattgtaaaggaacctcaacggctcaaccaactgccgtacacgacagcggtgattaaggaagcgcttcggctgtttcctccctctgcgtctctacgcgaaggccgcgctggagtcgatcttgtggatgagaaaggaaggcggtatcccaccgagggatgcaatgtgtggacgctgacagtggcgctgcatcacaatgccgtttattggaagcaggccgagtcgtttgtgccagagcggtggttggtgggacccgaggatcccatgtaccccgtcaagggggcgtggagggcatttgagcttggttctagggcttgcattgggcagacgttggcgctcatggaacttcgagttgcgctggtgatgacactctccgagtttgatatcactccggcgtacgaggattgggataggatgcatccgaggtcggatgtcaaggtggtgaatggaaatagggcttatcaggcagagaagggtggtggtggtgcgcatcctgctgatggatttccttgtcgggttacgcttcgcgacatggatggtagagagggtgacgttcagggttaacgtaccattcttcagctttcccatgtcaaaactccatatattcagaaatactaaatcatctttcttattccctctcacttggaacgaacgggtgacaaatgcccatgactgtgtttatttcttagcatgacctactgcccctgagctgcccctggctaacccctagctaacccctgaatccaggatccactatccacaagatcaccagcctcctcaaacaaaaccggtcgacgcattacacaggcaccatcacctcactttccagccaaaatatcagcagcaatcttctccgccaatgcgtacaccgtccccataggctgcccatcaatcgcaaacgggaacgccgacgcatccaccacccgaacaccatccacccccaaaaccctcgcattcgagtccaccaccgcattcggatcatccctcttccccatagcgcaagtccccacaccagcgtaatacgcatccgacgtctcagcaatataattgtaaatctcctcatcagtctgatacctctccccaggcagaatctccggcccatcaatcacctcttgcatcgtctccgacgccacaatagccctgcaccggcgaaacgcagcaacagccatctccttatccctcggatcgtccaaccaacggggatcaacaatcggattctgcgccgtatcagtactgttaatcgtcaccgacccccgactgaacgtcgccatcagcgccgccgacatgctaaagtaattcttcccatcatactgtgggacaaacgtgtcgtccaaggcaatgtaggaaaaagtcggccagtcctcagggaattctttttcgatatctgccgccgtcgagtccttgagcatgccgggctggtgcttctcaaaggcaaagtagtcctgcccggggttggtcagcagcccggtgcggaagttgttgtactcgtagatggaccgggggagggtctccttgctgcccatcagctggctgtggctttctacttttaccgggctggtcgggccgaggatgatggtgtcttgcatgttcttgccgacgccggggcggtcggagaggacggggatgtcgagcttctcgagggtgtcccggggtccgatgcccgagaccatcaggagctggggggagcgcatcacgccggcggagaggatgacttcttttttggcgccaatggtccactcgaagccgtcggtgctcaccttgacgccggttgcctttttcttgtcgtcgaataagatcttcttgacaagggtgcgagtgtaaaagttgaggttgttgctctcgaggagggcgtcgtggaggtaggaggtggatgctgtctcgcggcgccgggtgtaagggttgatggtgtgcgtgatgtaggaccggccgagcaggttgccgtcggagaagccttgcacttcgggaaagcccagtttggcgagtgccttgtccacccaggatgagatggcgttagtccagtaggggtaggcgacgtggactggcccgccggactcggagaatgcagaaaggttgttgacggcagtggcattggcaggtcttgggtttgtgttggggccggaaaactttacgcttttctggaagtacggcagccagttgtcccaggtgtatgcatcgtcaccgacctgctcggcccatttcttataggccccttttgagccgcggtgatagagcatcgcgccgcgggctgtgctgccacctagtgtctttccctgcatgtaaaacatggctcttttggcgagaccctacaatgatgcgttagctctcctgttcctctgagtgtccgaagagagggtgtacatactggctgtggcacagtgtactgataccagtcaaacaaggggttcttcacgtggccattatcgaagaagtagttgaacagatacatgggcacctcggtcatatttcccccctcaatctcgtagaaaccgcctgcttcgatcacagccaccgagttggcgttgtcttcggaaagtcgcttggccatcgctaagccagcagtgcccccgccaacaatcacgtagtcgaatgattgccctggccaaccgtagggcccgaagtgcgagctaagcaagtcttttgcctggatacgaccatccatgcgagcttcatcatgattttttgtcgtggtgaacagggacgagactcgaggaatagcattgaaggcagagagatacagcggctgctgtgttgcagtggcaatgccaacgctgattgtccgcgacagggcgacgaggtagagtggcagggatctcattttgagcgtcaagtgggtaggtaatgttaacagttcggcaaagctggaatatagttgaacactactagtgagatcaagtgaatctatatagccaagagagtcgcttttggctatgtaggtacctacccatctcggattccaatctgttcaattgctatatgtcggaccgtactgtgcctccgtctatcggtgtccagctttgagggtgtataccctagtagggttcgctttccggagccagagcgagccgcataccgatggtgccgactttcgcgatggccgtttgcagctctgtataaagttgaacccagtgtcgctcccaatgtcgttcggtcaacgacgtcttgctgaaaacaccttcacacgaataatcgcacaccatggccggtattggagtcgaggcaatcgcagtcgtgacaggatgcttcctctcgggtaaggatcaaccccgtcctgaagctacaagccgacaaactaagcacctgcgcgcgcaggagccatcatgagcgtcttcctgatcacgattccggtgctcatcgcaacgacaaaggagccggcaaagttggtcaaccaatggagacgtgtgtatctcagcggtcacgtcaaaggaccggccatagcaacaactacgggtctcgtctacgtctatgcggcctggagcaaatacgcagccggcgagccgtggcgtgtttttgccctcgccggagcgacgacggtttccatcgtgccttacaccttgacttttatgcaagggatcaacaatgcgcttttccgtgccgatgctctgactggcaagggagttgagccctcgtgggccgatgccgagacgttggtgcttcgatggggccggcttaatgctattcgggcgttgattcctctcgccggggggatcattggacttttgggcacttgccaggtgttgtcattttagagtacctagcaggagtgtcaggtgtcagaactgagaatatggtgtaaccccgcgataaggaaatgcatgtggtcagcctgtgccgccccccgacagtgctgttctgttggcattggtcgttgtccagcaagagacccggcctcttggctccccgtttcgctccccgatgtgcatcttgggccgttgtgtagtccaccacggctagatatagggtacacaagatggttccaatacctcgttgcgtcccgtcaacattctacacgtagacgctaaaatcgaacatcttgtcataacgtgtaacagcatgggtccactactgctcttggttggactggtgttcctttaccccctttaccatgtcatctacaatcttttcttccaccccttagcctcctaccccggcccccttctctggcgggcaagctccttcccatggaagctcacactcctccgcgggaccatgcatcacgatctgatgcgattccatcaaaagtacggcgacaccgtccgcctcaagcccgatgaaatcagctacgcaaacgcccaagcctggaaagacatccacgcacacgtcccaggtcgtccggaattcctcaaagaccccgttcgcctccccctggcacccaacggcatcatgagcatcctcgtctccgacaccagaaaccacgcccgcttccgcagcttgttcggccacgctttcagtgacaaaggcctgcgcgtccaagaggcaaacatcatccgctatgccgacctcctggtcgatgtcctccgggaagtcgccgacacggactcagccatcgaaatggtgcggtactacaacatgggcatcttcgactcgatcggcgccctctcctttggtgagtccttcaacagcctggccgatcgaaccctccacccctgggtcgacgccatccacaaaaacctcaagagcgtggccatctcgcacgtcttgcggagcatgggagtcgagttcctcaccccttacgtcctccccgaagaactgcgggggaagcgcgccgagaattacaagtacgccatcgaaaaggtcaaccgccggctgcaaaagacgggcgaccagaatgacttttgggatcgcgtcatcgtcaagagcggcgacgggaacgagtccggccaggggatgagccagggggagatgctcaacaatgccgccgtgatggtcgttgccgggtcagagacgacatcctctgtcctctgcggcgccacatttctcatgtgcaaatacgtcaagttcgacaaggcagcgcacgaggtccgctcggcgttcaagaggtcggaggatatcaccctgttgactgtctcccctctgccttacctcactgctgtcattgacgagacccttcgcatgtaccccgccgttccgggccaaccaccgcgcgtcgtgcccgcgggaggagccatggtttgtggcaaattcatccccgagggcgtaagtgcttcctttctctctgcccacctacctacctcagaaacacaatcaactgatgactatgcggcataaagatgcgcgtcggtataagccacatcggcacgtattacgccgactacaacttcaccaaacctcacgaattcatccccgagcgcttcatcaacaaggatgatccgatgtttgccaacgacaattacgccgcttaccagccgtggtctgtcggggtgcgcaactgcatcgggcgcaaccttgcctacgccgagctgcgcttgacactggccaagttgctgtggcattttgaccttgtgctggacgaggccaagacgggagactttctggaccagaagatctggtccatctgggcgaagagggagctgtatgtcaagctgtactctcgcaaggactgatggactggtggacatgattagggcggtagtaacttgaatgataatcaaccatgaaccccttatatcattgcgtactctgtggttttaaatacaagaggctcaaacaaagctgaagcaacctgttgttgaaaaatatgtcaggaattgataactggacagaaataatcccatgtagaacttcaccaaacaaaagaaatgagaggacgtcttcaaagtgatcagcaggctaggtgcacctattccttcatctgcttcaacaacctcaacaacaccccactcccagtaaccctctgaaccatctcgatatactctctctccaccgaaaaaggcctacccaccacattcgggatccacaggcccaccaactcctccggcctgatgtccgcaacatgaatgctctgcgacaaataggcccgatagtcatcaatctgcggccgtagtgcccttgagtggaaagggatgtcgatacccgtcagagggatagtggcctttccacgtctaagagcgtctgagctggagagaagttgagcacggggaataagaccgcgcaccaagcccctgagtgtggttatgtcaagcctttccggttcaggttttgtcgagaggtcatcgcaggctttgccgaggatccaaagcggttggaactaggggtatatgagcaagaagtgatggcggggagggtgaagagatgaggaagaactgacatgaccggcgcagacatactgctgggagcgaatgttgtagtttactgtctctaacaagaggcctgtttcctctgcgatcacttgcaccagggcttgcaggtgatcctccccgaagactaggtaaagcaaggcgagtgagaactcattcaaggctgcgaattggggaaatggggcaagatacctaggctgatccgtgaaggatcaacagcaaccatgctgtaatccgtcctgtcacctgcatcacggggcaaggcattctgcatcttcaacccgcggtagtatatgagcgatagcaggctctcaaactgcatgaacgacgtgcaagcccccagagcggcatattcgccaagtgaatgtcctgcaaagcgtgcgcctgtctgaacaacgcctctggtccgcaaatgtacatattctgccatctccatgacaactaatgctggttgtgcgaactgtgttgacatgagaagaccagtcgagtgggagaatgtgtacgacttcgaccgtgttgtcaggccgcgcaggattggctcctctctgctgtccccgccagctgtcaaaactcgtcgggtcattccgagatacatatttcgaatgtgtcgtccacggctgcctccaaagtagacggtgagcgtcttgggattgtcttgaacgatgtgcctgagcgagaacccgtagtgcattctcagatgatcctctgctcgatcccacagcgcttttgcctcgggcctcgtggcgtaaagtgacatgcccatgcctttttcctgacctccttggccgcaaaagacatatgcggtgtcaggctgctcaacatctgcttcggcagcgagcaccctttcccccgtttcgtcgttgaaggtctgtatactgagaatcatcctgccatcctccacagcaacatgttgcatctcgactctcaacctgtcgtttggtcgtaccatggcctcgaagcttgcctgccagcctttgaaccgggtccggtccgtatctcctatagcccattcgactgctcgacggacaatcgctgacgtgtgcatcccatgaaccactgtcccatgaagaccagcatatcgagcaaacaaggggcacacgtgtatcgggtttgtgtcatgcgaaacagctgcgtaaggggcgctttcggcgggtgcacgtacaagaatcggcgtgacacccgtccatcctggattctccagctgttgtcgagcagtgagaggtgatccatgtcggcggagaaaatccatgattggattaccgaggcaagagtcttgctcaaaatacactcggccgagttggataggggctgaagtgtcgctctgctctgccagagtcacgacgccggacacctgcagcaaggcattcccattctcgttgtcgtgtatggtgtgagtggtgagtttgaacctgagtctctgtccaatcaggtcgggcggctgttcgtcaaatatcaaccatttccggcttatcagaagggcattcttgacgggcgagtcaacatgtaccaccgcctccggctctctcactgaggtgaactgttcctcggcgcctccttgttcgccacgcaagaagaattctgtctcgatggtgaccacccgctcaccttgccttcggatatctgcagagattttgaccagctttcccgtcgccgtcgtggccaccgccgtgatgcgcgaaaatgcctgtaccgtatccccaacctgcagcggcctggcggatggagcgtaacgaaaggatatcgaccggtgaagaagccgcagtagattgcagttcaaacctgggatcagaaggggcttggtgagagcagtccacgccacaacgatgcagtagtcgagaggaataagaagaccactggggttccacgaacgaagctgtgctccgctgcttcttcggatgacattgatgtaatcatagatattccgctcacagataatcatttcgtttccggtgaactcggagctcaatcccgtaacttgaggaggacctgggcaaacatcgtggatccacagccggtggtataaagactttacggttgcggtgtgtgtcgaagcattctcgtagagtctgcagcccttgggcccctggtgaaccttgagcgggaactttacttcggtcacccgtttcgtggcgacagagggagaaaggatgagtgtgacgacgatatctccgatgcggttgtgggtaattttgagactggtacgtgggtttttcgctgttgaagaacccggactgagaacaatctcgttaaaacatgagtcctcagtcgcccgtctcatctcaatcgtatcacgagcaacggggaggaatgccgtcttgatcggattttggcaacgagaagtacccctgaaaatccagtcgtcttccaggcacttttctgcccatgacccagcaacattgactatgtgcttgatgagcctctcggtctccaaatctttgaaatccttagtcagttccatccgatatgtcacgccatgagttgtcgacaggactccagcaatcgcgggcaggttaggcgtcatcggtgctgtagtttctgtaaccaagctcatgggtgtgggcttgtatcccctttccagcatcatccaaacatgcgcctggcaaatggagtcgagtatgtctttggcggactcatccaaggcggtgcagtgtcgaacggcaactggcccttgaatcacgcagacgcgctcggcatcttggccaacgacggcatcaatgtcctcagactgccacagcgagtccttcttgaaccaagtgagaaagtgttcgtcgagcactgggataaaagggaccggcttctggcctcggcgacgaaagagtgccagaagtagagagacgtcctcgggatacagtgtttcggaggcaccagttcccagtgtctgctcaaatagttggacaatatcatccggccgagaatcagtagaacccacatccgaatcatgcccaaacctttcgtgtgccagaaggatgaattcttctaccagaatccgataagactcatcaatccatcgatcctggtggtgaacatacatgagctgacacagccgacgtaaaacgctcgaataggtcatatctcccaattcaatgctcctgccactgcaatcgacagcgaaccatgggcggaagtagtcttggttcaaacgatccgcaatctcatccttgtggtggcggagatactcaaggcgcctggtcttgtccttgatggaaaagatgctctgatcaaattccttccacagcatcatcccacgcgtggcgagaacatgaatgggctggcccatttccgactcgacggttatcacgccgcccgtaggtttgtcgaaagacttgtgccactcgccgtcctcgactcctcgcgccctaattattagctctttggcttggggggaagtgtgggcttccttggccaccatcatgcggctgccgaggagaacgccatccactggcatgggcgggtgtccaaacttgtgagcccattcgccggtcaacagcggcaatgtgtcattgccgcagccgagaccgctgccaactattaagacaatgttaggagatctccttatctggccgtacatggccaggagcggttggtggaagtcctcccaagagtggtggccgccagctcgaccaccggtccattgcaacccgatacagaactctgggtactgctgtgaaatagcaatcacctccttaattgccccaacggagccgggcttgaatgaaatatgccgcaagcctgggatggattcgatgtattctttgaccacctctgctgagggtatgcctgcgccaatggtgataccgttgatggcaactccatcacccgctaagctgcgcaatacagatatctgccaggaaattgttttgggattggcgtagagcaggttgcaagtgatacctcgttgcggagaaatggcagcagcaagggtacggagggcatgttcgaacccctgttcgtcccggtagccaccgccagcgagctcgatatggtagccagagttgatcaccgtggccacaaagtcccaggcgacggtcgtgggtgtcataccggcaaccatgacaggaggggcgccaaagagtttggtcattcttgtctctagccgggccacaccgtcctcgtccacaaccagactcggggcaaactgatccttccagctgagaggcgcccatggcaatgttagagataataactcgtcgcggccgctcggtccacccgagacagacctgtctgacacttggatcactcgcaggccagtgccttcactttgctcgtttatcagactgccaatctggcccggtccaaagtctagcacgtgtgtggtgccggtcgagctgagagtgtgcgtgacctggacccagtcgaccgtgtccaccgttatggtacgaatgatggtgcggagtaagtcgtctgactgagattcctggagattctgtgccgtatgtgtatggtaaactggtatagcgaagtcatcgcgggcgagggccaactccagcagatgggaccgcacgctggcgtccacatcgatcagatacgggctgtgataggggctggatatcgggaggaactgtacgccgacggtcggtttgcgcctacggtacaaaactctggtctggtccaatccgtcgcgagccttgatctgtcgaagttggacgcacaggctacgaagcgacccaggtggacctgcgagaacgaacttctcctttgagtttaccagagcaatatgtactgagttgccattgccgagcgctctgttggtcctttccaaacgtagtgtgagctggtcttgactcagacctgagaccgccagcatggacgacggatagccctcttcatgttcgacgcaatctgcaatagccgcggcaggcagggcgcaaggaggagtagcgtagtgggactccaaaccaatccaaaaggagatgcggagagcttcatcggaggcttgatagaaggacgaccaactatttgctttggcaacgaccacggctgccagaagcccttgtgagtgaccggtcacagcatgaagcagatccctgagttggccaggacgcttgccgagagcctggcatgtgatgcagtattgtgccagactgagtagggtgttgagagggaagctgatgggagaaagagcaaggcgatcttcggagggtgccaactctggattgtcgagccaggcttggagatggaaacctaactcctggtgaaagtcgctcttgtgtggttgtgatgacagctgggacaatgttgccgatgcattttccgtcagagtcctgaggttcggtccatgacgctcgaccaagtccctgaggtcacttaatgcagtcagattattgtggccctggccaccaaagatagcacatattcgagccttgccggtttctgcagttttgaggagagcagacgagttcgctccgccctctggtgaagggtcggtttcatgggccaagattgcagtcatgacgacgccaacaataattaatcaacaaaagagatcgaggcagcaagcaatcgtgtcgaatggtttaggcacatccaatgcaggggaacgagctgaaatttgcatgtctttcactccattgttaattcggccgtaatcggagtgcgaacattgtgctcatgcttgctcggccaccgtggtcaggcagatgcctaccagataaatcgcgaccgcctcgattcaacttgtcattggggcggcgcacgacacttccgcatctgcaccatgacacttaaaacaatgaaacaaaaagcattggacgacagagacattgctcaccagctgcttgttgagctcctagtgtaagacagcctcttttctctccttctcctcattgcaacaactaatgtttatccccagccaccaatttgcctttccggtaagatggtaagctcatgccttctctaacaatccagggcattgaacatctaggaaactcatatcagtatacaggacagacacgcaggacaacttgctatctggcaacgatgccgtcgttcgattagtcgagctcggaccgtcgagggtgttggtgaacatggcacagaagacgatgctacgcaagatcgattccggagaagcaccggccggccgttcttatcagttcttggctagtgcccatgaccagagggagcttctgtaccaatatgaccctccactacagccctcaccagttgaactaccaccaccaccaccaccgccgcccaagccaccacagctcaccccacaactcccagtccagccagcaccagggacggcgcctgtcaaggattgcgctttgtcagggctcgaagttgtgcgtattttgatcgcacggaagctcatgaagtcgatggaggaagtaccaacttccaaatccatcaaggatctatgtggtggtatgttgtgctaccaagtcatgttacttcagtactgacataattgaaggaaagtcaacactgcaaaatgagctagtaggagatcttcatgctgaatttggccttctcccggacagaccagaagacattcccttgaaggaccttggcatcatccttgacccaagccggccactgggaaaggtttcatcagcccttgtcgccagactaatagcatccaaaatgcctggcggtttcggtattgcctcgatccacaactacctcgagcagaggttggggctcagccctaagcgacagaccgccgtgaccttgtgggctgtcgctgctgaaccaacatcacgactgccagacaaccaagcagccgagagatactgggatcagattgcacaggactatggtgcgttctgtggcatcaacctccaacctcgaagccaacaacttcaacaagcatccaatgacgccgccagcgccaggacagttcttgttgactcatcagcgttcaaccaagcctcggaagctcacaagcggttagccacgaagcaataccacgcccttgccgagtatctagttttcagttcttcagactcttcaagctctgataagaaactcgtcacagacctgcagcttcagcttgatacctggtcagcggaattttctgacgagttcttgtcgggaattgcacccacctttgatgctggaaaggcgcgacagtacacatcctggtggaactacgcccgggaggaagtgctcacactgtaccacagtggtcaacttcacgacaagatgacaatggaaaccctcatcaaccgtctcgcaagccgagctaatggaccactttcccttctggtatctcatcttgcagaagaatgtccctcggaggtcttacgcgagctatttcagcgggtagtgcgtgcaagtaatgcaggagtcaaaaagcctcctgttgctcggcccatgtggccaacagctgggccacgaacgattgtgaccgaggacggagatatcggctatgtagagattcctcgtccaggcttctctggacctgcggcctacggagactacctctctcaccgacttgctcaacctcgggagaccggcgattcccctgttattcgcgtcaacgctgctcatgccgatcatgaggaatcagattggaccaagctgttcatccaaggaatatgtgacgctctcacaaccggcgtctcattctcagaaaagtccatgctcgtcaccggtgcaggtcagggttcaattggcagcgaggtcattcgcattctactcgcaggtggcgcccgtgttatcgtcaccaccagcagggagcccagcaccgtagctggctactttcagtccatatacagggaccacggtgccaagggctcggagcttcacctgcttcagttcaatcaagccagttcacaggactgcgagaggctgatagaccacctgtacagccaatcctgggacctagacgccatccttccctttgccgcagcccccgaaggaggtgcagagatggatgccctatccccgaccaacgagctggcacaccgattgatgctcaccaatgtctttcgtcttctgggccgcatagtcaagaacaagcgtcgcttggaaatcgcgtgccaccccactcaggttgtgctcccattgtcaccgaaccatggtatcttcggcggtgatggtctctattccgaatcgaaactgggcttggaaagcctggtcaaccgagcccgctccgagtcttggtctgaccagctgtcgatatgcggcgtggagattggttggactcgatcgacgggcctgatgacggctaatgacgttctcgctgagacgatcgagaatcatggggtgttgaccttctcggcgcaggagatggcgctgaatattgccgtgttattgacgtcgaaatttgtcgatctctgtgaagatgggcctatctatgctgattttggcggcggcctctcgaccctgggtagttgtcacgccattctgtccaaggctcgagaggaatttcggcttgccgctgatgttgcgcgagctgtcaagaccgaggatgaacgcgagcaagcgctcctaaagggcaccaagtccagtattaagagacctttcaagcaaaagacgatgcttcgagtgggctttccgaaactcccagatacgttaccagaccatgacattggtcgtttggtggaccccgcaagaaccgtggttgttgttggcttctcggaactgggcccatggggcaatgcccggctacgctgggagatggaaacttttggccagctaagtcctgacgggtacgttgaaatggcttggcttatggggttgatacgacacgttgatgaaccttgcaagggtggtcattatgttgggtgggtcgatgccaaaacaggggaaccggtcgacgacaacgacgtgcggcacaaatacggcgaattcatcaaggcgcacaccgggatcagatttgtcgagccagatacgattacaggctatgacccagcctgcaaagagctcttacaagaggtcgccgtggaggaagacctccctccctttgagacttctctctctacggctgaggccctacaactgaagcatggagataaagtagtcatattgcgcctacaagggaactctgatagttatcaagttcagatcaaacgcggtgctaccatccttgtccccaaagccgttccgttcccttggggttcagtggcaggcttgctgccgagtggatgggatgctgccaggtacggcattccaaaagacatcatccagcaggtggacccggtgacgttgtacactttgtgctgtgtcgcagaggccttttacagtgccggagtcccagatccaaccgaggtgtttcagcacattcatctatccgagctgggaaacttcatcggttcatccatgggcggtgtcctcaagacccgccatctctaccgcgacgcctatctggaccaagatattcaggcagacacactccaagacacgtatctgaacaccacgcccgcttggatcaacatgttgttgctgggtgcagctggacccatcaagaccccagtgggggcctgtgccactggcctagagtctatcgattccgccatggactccataatggcaggcaaaaccaagatgtgtcttgtgggaggctacgacgatttcggagaagaggagtcactcggattcgccaagatgaaagccacagtcgatgtggccgcggagctggcacggggccgcctgccctcggagatgtcacggccgactgcagaaagtcgggctgggtttgtcgagtcccacggttgtggcgttcagctgctctgtcgtgccgatgttgcactggaaatgggactccccatctacggtgtcattgccggatcggccacggctgccgacggcattggtcgctcggtgcccgcacctggccaaggtatcctgacctttgctggccaggcagagcagcacatgccactatacactcagctgtccatcagaaacgatagcttttcctctggctcatcttctgagccggagctatggacccctgtgagcgaaaaggctggctcaaaatcaacatcttcttccataggggcggctttgggggcttggggcctcacgatcaatgacctcgacgtggcctcgttacacggcacctctaccaaagccaacgacctcaacgagcctgaggtgatacacaagcaaatgacccacctgggccgcaccgatggtggacccctctgggctatctgccaaaagtccatcactggtcacccaaaagcgcctgctgccgcgtggatgatgaacggatgcctgcaggtcctcgacagtggtcttgttccgggaaaccgcaacgccgacaacatcgatcctgccctaaaggcatatcaccatctgtgctttcccactaggactgtcaggatggctggtgaagggcccaaggcctttctgctcacgtcatttgggtttggacagaaaagcgggcaggttgttggtgtagcaccgcgcttcttctttggctcgttgcctgccagcagctttgcagaatattgcggcaagaccaaagcaaggcaggcaaaggctgatagggcgtttgcaaaagcggtcatggagaatcaggttgtgaaggtgaagacggagcctctgtatgtcaaaagagatgcgtcccgtatctacttggaccggtcgttgagggttgggcagaatgatatcacgggagcgtaccagtttgccactgtctcttagtagttgttaccagtttcgtattatcggtacccagctttaattgttcacgcattggttcagcttcaatgatgattgccattcttctaacccaactgtctagtcactggccacccaatgaattcccttgaacatgtttccccagaataccttttgatgctccgcaagactcttgcaagggaacaaccacgagtagtgcggataaccaggataagcatcgtacagaaccgccacgccagcttcctcaagactatccttcatgagccttgcgtcatctcgcagcgtatccgccccagactcggtcacgtataccttcttcaaatccccgaggcgggggtgaagaagaacagacagatatggatcctccggcgtgccaccatacgtgtccaaccaggatagcatcgccgacttgctgttgaccgtgtactcgtcattctcgtcatacgaggtataaccctccctcttgtccagcggcacagcatcagggtgaaccgtcaccggagccaacgccaccactcccttgaccctatcccgcatacccatcatctcaatgagcttcagcccgaccccaaacgcaagattgccaccgctagaagtccccatcaaggtaatctcgtcagcaccaaagtgatcgagggcccaaacggcagcagccaccccgtcgttcaacccagtcgggaacttgaactcgggcgcgagtcgatacccgacgctgacgatcctcatctgggcattcttgcttagggcgcgggcgaagccatcttcttgctcgacgctgcccatgacgaagccgcctccgtggaagtagaccccgagagggagattggcgtcactggcgtcgttgggggtgtaagtccggaccgagaagtcgccgagatggactgtctcggtgattatggtcgggtcggggggagggaagccgtatcgttgcatcattttgctgatgaggatgttccattgctgcttggtttcgtccgtggagccggttagatggggtgcttggccgaggtcggcgatgaactggcgggattgggggtgaatatgggggccctttcccgatcatgtaggggtgagtcttacctcgcgatagggtttttccaagcgggattcggcgttcattttgggcaaagcgggtggtagacagtgggacagaatgaggaaaaaggggcagccttgtctgacccaggatcaactttgagtggaataggtgcttttatgggtcggtggccgaagggttcatccaagtgcggatagcgcacggcgtctttaggtgtcaataactccagcaaccttcggccaccggggttttatacatgtcagttattcgggtcaagatgttcattgccctcgcccaaagtcaacccttcacacctagcaagtcaataaacgattacgaagcaatcttatcagcaagccagccaaccaaccaacgatgcctgtttaccacgttgctcttttcaaactcaaaccagaggctgaccccaacaaggtgaagcagtggcaagcactagctgagggaatggtcggacaagtacctggtagcaccagcactccatgcatctcaccgaggaggattgctaacaggtcttccaggccttataggtcttcaggcaggcgcgcccattgccttgacggcacccatggcaaagggctttgacatgggcgtggtggtgcacctggattacgtcgagagtctggcgaccttttttacccatcccagtcatgaggagtgagttgttcttgtgtccactccattgataatcaggtatttttccaagcaagggttcctctaattccaggtgtcaatcagggtcaatgaactgtacaaagatgtttgtgagatgggtagcactattggatatgacattgagttttagttttaaaagtttgctgcttgccaatgggacgctacacattgagactacctaggtgccgtgaaaccactctgtgtcatacctacctaccggagttaaaaccaatcatatgtgtaaaagagataaggcacatcaatgatattcaaaactctcacgtcagtgtcagcccaggtggctaaagtcacgcatcaaacccagcctccctcctcctcttcataatcggcctcagttgatcccccgcccacccatcctcatagtcatccttgagatcaaacgtcccctcaggctgaatagccagtgcccgtcctgcatttccaagtcagcatagttcccctcagatttgaaagcaaaacacataccatgcacaccgccatcaaccgcacaataactcgcagcctccacacaagcctccacgctcacaaaatccaacaccctcgccatatcaacccccctagccgccatcgcattcttaatcggcgcaacaagcggcgtgtccacaaaccacggcgccagcaaattgcacctgacgccgatatccagcgtccgggcgcgcgtgctcctgaacaaaccccggacgccgaatttgctggcggggtaggtcgatgccttgggactgtccatgtacgcaccgattgaggcgaccaggataagtgacttgtccggctttgcaccttccgaaccaccagtaggaggcaacaatcggaggtaatacagcgccagccaggagctgtaataaaccccaatcagattcacctctatattcctaatgtttggctttgcagggtcggtgtcgaggctgggctggccggcggcgaggacatggtcgacttggttgcctggcatgaaggctgtgccggcgaaggtggcgacgatgtcgagcgcttgggttggggaggaggtgattgctgttttgaaggcttgcacttgcgagtcccagtttgtgacgtcgcactggacgtacttgatgttgttaggtagggagtcagggggggtttggatgtcggcgattgtgacgtgggctccggcggatgcccaggcgagggcggtggcgaggccgaggccggaggcgccgccggtgatgagggctgatttaccgcggaaggtggagaggttgacggtggtggagatggggtccatttcgacgggaaaggctgggggcgtgctggtgggtgggatgatggggtttgttcgtatgaggttcggttgacttcaagttattctttttgtaagaactagcggtgccctgatcatgcaatctatgcaaacacgtgggacggccttcttctggttggtagaagctcggggcccggaggagggttgatgcaggttcggagggacaaaactagaactctagcaacctcgagtatcgggccctctaccatctcttgtttgcccctctcactgtgaaaggacaaaagcccttcatgatggagctcgtcacacagtacatccttgctgtaagtcacgctttgtgaaagatgaagagccaaacagatactgaccaacccacggctccttctcctaatccccatgacgataggattccatcgcctatacttccacccactccggaaccacccaggaccacgattgtgggccgtctcacgtctcccctggctctacagcacagtcaaaggcaccattatccaggacctcaaagccttccatgaacaatatggccccgtagttcgagtagcacccaacgagctatcatacaccacccccgccgcagcaaagccaatctaccagtccaacccggaattcccaaaggaccccatgcacctccccccctttcacaacggaacaccaggcatcctcgccgcggaccaccaaaaccaccggcgctaccgccgcctcctctcgggagccttctccgaccggggaatgcgcgcccagcaaaacatgatccagcatcacgtcgacctgctagtctcacaactcaaacaggcggcgtcacaagacaacaacaacaacaactcggtagacatgtgccaatggtacaactggacaacatttgacatcatcggcgacctcgcctttggcgaatcctttggctgcctctccaacgcggccacgcacgagtggatcgcgtccatccagggaaacgtcaaggccatccccgtcatcaacgccatccgccggctgaggctggactggatcatccctctgatcgcccccaggaaactcctcgccatgcgggctcgcaacgcaaagttcaccgaggacagggtggacgcccggagagggctcgggacaacgacgccacggggtgacttgtgggatggtgtgatggagggcatgtctcgggacgagatgatcagcaacgccagcgccattgtccttgcggggagcgagacctcggctacgctgctgagcgggtgcacgtggttgctgctgcggaaccccgaggtgctggggagactgacggagcatgtacgggggtcgtttggggatgagtcggagattgacctgattagtgtggggaagctagattacatgctcgctgtcctggatgaggctttgaggttgtacccgcctgttcctatgcagagtaaccgcgtggtgactggcaagggggggggttcgattgcgggtggatgggttcctgaaggggtaagtttgttcctgttccccaaaaggaaacatgacaaagcaactggtaggctaatttgaaaggacctgagacaagacctcagtggcactccagctctacgcggcatgtagatccagcagtaacttccaccggccgaatgaatttctccctgagcgctggctcgggggaaaggacgggggtgcctttgccgatgaccggcgtgaggtatcccagccgttcagcatcggtccccgcaactgtatcggccgccagctcgcctacgccgagatgcggctcatcctggccaagatcttgtggcactttgacctgaagcttgattgcgccaagatgcagggccgcgattggatggggggccagggggtctggatcttgtgggataagccaccgctctgggtgacggtacgtcccaggccgcgttcctgagttgcttgggcgtgccgcggaggattcagtgtgtgagtggtagtgcagtagtaatgtgatagtgcccactccctccccccacctgagcccctattcagatagcagagggtgaattgtgagggccttgtaggatcgataagcccatgcgtgtcagtgcaagggattccctgcgagggattcccttgtcggggcttgtaccgtaatgactaccctttgcaatatcacgtcaatccccatcgaccggttaaggctttgaacgtagcagtcgtgctgcagagttgttgtcgtacatacatgaggtatctacatagtacgtggtccagctggctggtttgatggtcccacaagattacctcggcatgagatctaggtatgtgattgctgtcccttcctgttccaagataggtatgcaggtgagaggcgttcgcaaagttgagcggccaatgggatgagtgagccaccatctacaacccaccggttaggcgtccccggtgagggccctatcacccaatcgacccatcttcatatccttcaccgcttttttggtgtaagtcgtctgctgctggtaggaggagatacgccgtgctgtgccgtgatgctgcagccggaaggatttaaggatggcaaaggataaagtcttgttgtatgtggcccacttactcagctgagcgtggtacgacaggcgctatcgtttcttcaaacgatagcgatccgcagttcgttcaattggaaaatgatgtgatgatcggcttggagttgacgttacagttatgtcatggtgtgataccccgcactctagacctgctgtcagcgagcacagtcttgcccgctggcatgaggatcagacgatacagtaggtttccagtatgcctctaatgctgcgaagagttctgattcaccatcaccatttgatacaatgctatcaaagatataatgcatcaatatagattggccactggagaatcagcgcctaagatcatcataggactgatatcgaatctccagcgccacaaacgggctgcttgggcatcggatctcatccgtgaccacaaaccctcccgagctatcgcggataccgtttaggaggtccaccacctctaccttttccgcgtggcggccattggagagctgcagcagggaaatatcccgcagccgtgccgtcgcctcaacttcaacgtccaccgtacctggaggcgggagaaccagggccgtcagaatgagtcgggaccctggattggcccgcagcacatcgacgtgtgcggtaagctctgcagtggcgtggatggcgatagtgctccacttgagggatggggttggagacgggaggtgtagaatgtagatggcggcgttccgtaccggttgcgaggtccctagagaccgtttctgaagggtgaccttggcattgtgatccgagtacccgattccggggaccggtgggagggcggcagggaggtgggggagacggggtaaatcagaagaggagggtgtggtggtcgaaggagcttcatacatttgtacgatgaactggagtgtcggaaacaaagccaccaggccagccgctgtagcgaacgagtgagcgccaacctgcgattggtggtcagagttattgtagtttcgctagtgggagatctcgtgtgaccagctaggtgggtgtaggagtgtagcaggggtaaggtaacttacgtccaccaccgtggcatttcccaagctgccccagtccacccgcatcagcacatcgcgggtgccagcttggtcaccgtttgtaacggattcgagataagtgccaaactggcgctggagtctgggttgtagctcaaagacactggctataggaacgccggtatcaaaggcaactgtgtaggcagactgatcggtgcggtctgaagctccgtactgcctggtggcagttgccatcttcaacgaggctggggcagcggtgcccgaaagaaacatgacggcgtcgagaagtgccggctcggtcacaaactgcgccgataaagggctgtgggcgacatgaccctgctggggctcctgaaggaatcccgaagtgatcatcaggcggctgactcggaatagctgaccctctggcacgccacagatatcggccacgtccttgaaaggaacagcatcgtcgagcgggatacacgccaacacctggaattcgcacagccattggagacaggcaaccagttgagtctgccaacaaggagaagtctcagctttccgaaatacctaggcttccaaggctcgtaacaggaacctggggaaacacgggcatggtaaaaagtcggcacgggtgggactagagagacaagcgggtagaaaaaagccgaaaccggggagatagggaaagaacgatacgcacgtgaagggctaggccccgaaggaaatcgctaggttgtcgctgcatcacctgtttccaacagacttggtgatggtcagagataatgagttcccagaccgtgactgggaagtcttgagataagtatgggggccagtggcaccaaattcttaggatatcaggtgctcggcaaagtgattaggtaggtattgaaggaaggtaggattccgctccgcactgacggcgacctcgggaggctaacaacgaggagagagaacggttgtttgacaagccatatactgaacagccgtggggtctcaagtcgatctggtgaagtcgtgtgcgggttaggtaaacgtgaaacatatggtttccgaaggaagctggggatcaaggaatggaattggtggaggactaatcggagggtgtttcccctaagaggaacgagaagggatcttccggtcgctactatgggtgatatcagtggtctggacccgacagtcgtatggctgggctctgtgctcgctgtcaactcggttcatgcgattattgttttttcatgatcctgtgcagttcatttaccaaacgaaggggaacttacagcgatggttcagtgtaaagcggctcgacccagtggcggtcactaggccggaacaggaaggttggcgaaaacgcaaagggtacctagacgaagttggggtggtgggggttgtgattcaaatcgagtgtaagacactaagtaatctgtcggacctacttccctccgtcgaggatttcgaccttccaatctctcagttggtctctgatatgaagggtctcgatacctacctgctgtaaaagcccgtctgacagactgtgacagctgctcatagggtatggtgtcacattccgcattatgcaagcagcatgtctcataagcctccgagtatctgctgtggcccagatgcacggccaagtagcattgcgtctgcagttggctttgtgagagcggggttattatgtgccatagacagatgtgtaatggacttgaagctcgagctcgcttatcagagaactacaggtacctcactggtgaagccgttctatatagacagacgctctcaccttcgtgagcggcataacaagctcgacgtcaggtctgtgtaatcttattttacgcaccttttttcgcggtaatgctcgacaaaacagctccgagtccatcgtcagccggcccacccagcgctcagaatgcccggaagttgcgggatagctgcaccgagtgtgcgagctccaaggtcaagtgcggcaaggagaaacccacatgctcacggtgtgttcgtcggggggccaagtgcacctacatggcgtcaagaaggacaggacgaacctcgtccaacgcgtccaaaattgctgccgaaaacaatccgaacggcgctaccatcgatgtcaacagcggcacaggctcggcccggaatgaaaggactgaaccatcgagtccagtactgcgcgtgggaacgcccttgaatacacagtccacgacgatgacaacgacgacaacaaacacctccgccgccggggaccagcagacccgccacagcaccccaggccccgggcccgaattggatgctatcgaccccgagctgtggagttccatcatgtcgcccagcggcttgatcacgtgtgacccggccagcctctcaccccccttaacaagcatcggcaccgatgtcgggagtctgttcgacttggactttcattcccccatggttatcgattacccggtggcagaccaggcaggcggcggtgaaggccggccggtatcggatctaaccagcaggatcaacgcctcggtcaccgatcgtgatgtctttgcctctcaccatctgacgtccgagttcgactggtccgtggttcagaaaccacagtgttgcttctccatcgccatcgacatcctcagccgcctgtttccgccggcaccagctgggtgcaagcatccaccagcgagccaggttgacacacccaaggcacgcaccatcgagtcggtcatctcggagaacaagcaaaccatagagtccctcgccaggctcctggattgtgattgctcgacagaccagtacctcatatcgctcatgacgctcattgcgctcaaggtcatgggttggtatgctgctgcggccgacgacgctgcctcggcgcaccctgccgcctttgagtggccgggctcccaatcttcgtcccgctccagatcatctgtctcgtcgggctctgtggcttcgggctccctcggtgagcaggtgttgcggctacctaccattgtcggcaactactgcgtcgctggccagcaccagggtcgcatggcagctcagctcgtcctgagcgagctccaccgagtgcagaaaattgtgaacggactgtcatcgcggttagaaagcatccgcctgcgtgcagctcaggacggcggttccggggctagctctgggtcgagcagtgtgggcgatgtaagcgagcagccagtaggcggtgctcgtgccgggcccctctcggttccaaccttcacccagcttgaggatgacctgagaaagcgattccgggtgttgtcgtcggaaacgatcaacatccttcgtcgcgcctagaggttctattccccatcgactgcacgtgtcacgagttatgacttggcgttggcgttggcgagttttcaggggcctatgatgtctttgttccaatctcgctgtttcagtgttgttcactgataagatataataaatatcagcagaaatcatcgtcattgtctcatcaatgactttttgtgtgcgagtcctcaagtcgtgcgacttccagaggtcccatgccaagcctaacctgttagcccccgaactgtttttccattcggtccagtattgtggagccaaagcattggttctagggcccctgacggatttactgtagcggggcccgacttggctgtcaaggcaaggactcaagctggctcattgcccatcatgcagtgagcaaaaagataacagtccaatgcaggtgcagtacacccctcatcaatcaaagctctcaaatcttgggcgagggatctcctgaaccatggcacaatctcttggcaattgtttgtgaccgcggttccttgggacccccgcaacgctaaaccaagaaggaattggggtcgattcctgtggggtcgtaacgatgcgctagcaggcgctaaatcttatttgtacgacactcatgatcatgatcagtcacttcagtccagctcaaattgtcacagaccggtgtggcaaagcagccagtgtcagtgtccctgcatttgcgatcctgtctcatacccaggaacccaggattcaggagcagaatattatttgtagcacactcgctcattgtatgctaccctcttcgcgcaggctgaccacccaccagggccaccaccatcagctcgtatgcattgtactcatcctggcagggtgtggccgcatccgcgtactcgcttccatatttctcacaattggcccgctctaggcgtgctatcacgaccgttgcttacggggtgtgctaccatctacagcctcgttctgttttcgctctctcatgcatgtgtgagacatcggagaccctgcagcatcctaaaccctctaccaagccaactttgatccatcctcatgcagcacaaactggccagacgtcttctccttggtcgcttcgtcaatctgtcgcgcaagagaggcccggcacgtcagcaagtgtttttcctttgcccaccaaacaaagaaatagctacatacccgcgcgcaaattcccgttatgctctcctcgatcgtggtaggcgctttgcttcggcccatgagacgcgccccctgatctcccatgtcggtttgaacatgactacccaaaccgatcagttcagccttcggaaaagttaaacgccatcatgaaaaaatatcttacccgggatccacaataaaagccaccagccacttattctcaaagtgaaactttctcaccaaccagttcgccgccagcttggacacgcagtacgcactcagcgggacgcgcgcgtactcttccatccccgtgatggtgctcagcggtgccccgacgagcacaaactttgcgtttcccgcctttgccgcctggagcaggaggcgcgtggcctggaacaggagcagcaccgagtacgtgttgaccatcatgtgattttgcaggtgctcgagctgcatcgtcgaggcggggccgtagtttgtcgcaatggcggcgttggcgatgaccacgtccaggtgggtgatgctgtgattggtctggagctgcgaggcggcggccgaggcgtcgctttccgaggcgcagtccagcttgacgactacgagggacgaggtgtctgcctttgggagagactccagggcggctgactgagtcgcgacatcacgcacgcaggcgatgacgatgctgtcggggcggaggaggtaggcggctacgaggcctttgccgatgcctgtggttgtgttatcattagagatgcaaaatgaagcaagatgggaagcagcagtacctctgctggcgccagttatcagataggtctgtttgtagtttcctttgccgttgatgccgttcatgatggcggccatcatgtttgtctgccctccttggcaagtctacgttcaagtctgacccgagtatccaagtgcttgggaggtttttgtacagccaacgcgggcgatagttcattcccgaatccacagcatcggcatccgaccaagcttcccccggactacatccggcaactggcatctgtcatcgcaacgtgcggggccatgcatttttgagaaacaggacgtttcattttgttgcgtatgccaaagaacgacaaaaggtgaatatctaattacatgttctttcatatcattgatgtcctgctctcaaaaggcaccgacggcttagttccgcttcggcgcgggggcaccgtccaaaatacccagtagtacggcgccaacggcggtgatcatgggcgcatacccccagtggttccactctccctgcccgtgactccagcacacaatgccgtcaaccacggcaacaccactagcggcaacgagggtccagccaagcgacttctttgtgccgaagagggcagcagcgtagatggccactcccataaaaatgtcgcgcgcaccatacacggccatcaagctgtccaccatcttggcatcggcagcggacgccgggggagcgaactcgaagaaggtgagggcatgttgcgggcggaggatagcgttgatgccaaagccggtgaagatggtggcaaaggcgtgggcagcatactgcagagcggaaagctgagaaggggccattgtcaattgttcgtcttgtgatttgactgcgattgcgggtcagcaaatgcctgtcaatgacatttttaacttctctgcccaagttacgtacgtgtgatggtgtgactcttgcgatgactcgggctgctgtgctcagtgcgagatggaaggaaggttttggggaagaaaaggaagaagcggggagacagttggacagtgctacagctgaaagtttggaggcagcaacaaagctccaatgccgtttcgggaaggcatgcaaactcacttcccgtccttagcggcaaggtgcagcgtctgcctgccagtgtaaccaccctcttacagcaggctctttgtctggtggtgagcatttcagccctaacccttgggcatccgggcaccatcggtgattcccgcaccatgctacccttcctgcgcccacctctgcactcacgtgctgggtcttaacaacactcatcggtcagcgaaaaattccaaccccgagctccctcactggtactcggtgaccggtcatgtttctgtgccacacagcctctcagagggtgacgctttggcgaacgcctgagctggcacacagctacacccacagctgtcactgtcatctattttgggacaaaggctgcttgtctaggaagccacctacctgtcaaacgcctgctgggcgtatcaccagccgccggcgctaattgcctacctactgctgcgtagtgtctgactgcggacagcacacataatgagtatttcagcaccgtccaaggtggtaccatgtctcaatacttctctctccatgacagccaagtatacgatattctgaaccgccatcaggcgtttcctgccatatcaggaaaccatatcgtgacacggataaacctttgtatccggatggggatatttcatagacacatacggccagatctcgcatgacgcgaagtaagacgggagattaccacttgtgcatataccacgcagctgaggacccgaggcaatggtagggagccttctatgaggcttcctctgtcaggggcaccctccttcgctcaggggcaaaccaatcaacagagcagcaatccttcagcctccacgtggtgtaatatcgcttgctgtgctcatgaggcgctgcatgacggcccccatccatccaagaccatactcggttgccccgagcataagcctgccatgaggcgcggccgaactaacgggtgatggcgtcgtccttgaggcgaagagggaacattccagcaatgggagcaggcctggatcacgatggcttggatggatcacgatggcttggacttgaggcaaagactcaactggggaaggggatgagacggactcgagtacttaaaggtgcctggagctcaagcgattctccccatcatcatcaccaccaccatcaccaccaccatcaccatcaccatcaccatcaccatcaccaacagcttcaggtttttacactggcaagatccgccacttcctggatgcttaagccgaacgtttgtttcccagatacctagctagtggtcttgcccctattcaaaatgttgggcattcgcctggtatctctgctggccttcactggctcagccctcgcagaactcgacttctccaagtggaagactcgccagcccggcgagctccgcgctccctgtccggccatgaacagtcttgccaaccacggcttcatccagcgtgatggcaagaatatcaccgtcgagggcctcacccctgtcctcaaggaggtcttccatctcagtcacgagctcgccttcaccgtgtctcagctgggcctctttacggcgcttgacccatccaaaggtgtctttactcttcaagacctcacggatcgtcacaacgtctttgagcacgatgcttccctgtctcgcgaagatgccaagttcggcggtgaccagtctgttcttcataaaggacagttccaaaagttcatggatcacttcaagggagaaaagtacatctccttcgaggccgctgctaaggcccgctatgccatggtccaggactcgcgcaagagaaaccccgacttcacctacgatgtcacgcaccgcatcaccagctacggcgaaaccatcaagtacctccgtaccattgtcgagccctctacagggaagtgcccggttgactggatcaagatcctttttggtaagttgccacctgtcagcccccatgcatgcctctcagcccaacctgctaacatgtcatcttcagagcaagagcgtcttccctacaacgagggctggaggccccctaccaatgagctcagcggcttcagtctcgcgagcgaggttttggagctggctttgatcactcctgagaaacttcccgtcgatgagtgcttgggcaagggcaagggtaaaggaaactgcaagagacggcgcagctaccttggtatctaacagcttgtaacaacacaccatgttcatgacacattggtttcccttttcactgtaccatatacttacttttaatacattacaaaggaatcgcaaattactctcattgcccaactatgtcccgtctgttaccccttcattgtgatttctagcctccgagacttcggaacaccagcaataaaactatccaccaccaccatgctctctggcgtagcagaagcggcaagcttggctcccgcacattcccggaaaaacatggccgcagccagccgcatttcgattcggccgagatgcacccccaagcactgccgggcaccgtacccgaacgggttgaacgacatcttggcccgctccgacagctgcttacccggcagccagcgggtatggtcaaacacatccggattctcccacgcgaccggatcgcggtgcaggctccagttctgcgtaaccaccactgtatcatccgggacatagtacccaccaagcgtggctccccccttcggcacactcctcggcatcgaccccggcgctgcgccatacagccgcaggctctcgtcaataaccgcgttcaaaaccggcaacccttcgcacacctcatcagtaatctccccactccccatccccgccacctccgcctcaacctccctctgcacctccggccggctgagcacgcaccaaagcaaaaacgtcaacgaaatagccgtcggatccgacccagcaagcaacaaagcaccagcatcagtgacaatatccgtatcactcaacccaggcggccccccttgctcttcctccgccagcgcattggcaaacagattcctcctccccccaccatccacaaccttctcccccctccttgcctgcgccacaaccctatccccagcagcaaacatcctctcctgcgagtaaaacacatcccttagcggcctcaccaccaaagcaagcatcctcccgaggtaataaaccggcggaacaaaatacttgagcaaatgcgccaaatcccccatcctcctttccagcataaccacaaacgggtccttcaccccctttttcaccgtgtcctccccaccaccaaacgtaagccgacagacgatctcgttggccatgagggtgaaccaccccatcacctccgcccccttttctcctctcattgcatcagccttgattttcgccaccgcgagggcaacagtctcgcggatggtgggttcccattctttgcggaggctggaaagggtaaaaccctttgcgtagagccgacgccgggcagagtgtagctttgggtcccgaaaattgaaaatgttatccacgggcccgggggagaggagggcgtaaaagggggcttttgtgaaaccggagcccatcttgtggatttcgcgggcggtggtgggctcggcgatgtcgatttcgcgggggctgatgcggacgatggggccgtagcggcggtggagggagtggacgtagtggattcggttgttggagaagacggagtaggtcaggcggagggaggtgaagcgggcgtggaaggggccggggattttgccgaggggggagaggaaggctgtgcggattatctgggagtgatttcgatgtcaggagaacatagggcaaaggtgtgacgagggatggtggcattatggaagaaaaacttacggtgatggcttggagagtgacaaaggccagtacaagtagaatacccacaaagggaaggggcgcgcctgttgtggcgtcgaggatcgactggtaaatcgtcatgtttgatgcggcagtctctcaggaaagatttgtgaacagtttggaactgctgatgatgcatcagatgggctgtcataaaggcgacacaagttgcttggggtattcgatattaaatggagagcagtagtgctttacggaaggtttttgttgcggtccccgtgagtggcccaaactaggcacaaaattcattaatagagggagtgataccaataatcgtcacaagccgagcgacggagcaaaattattgacagactggccctttgatggtacgatacctagctaaggtaacacggaccccaaaaattgtgagtttctgccatcaggacgagattgttcgccatggatctcagccaaggcctcggccaccgaatgatattccatctatttagcctaccccggatacaggcacggaggtcaccgtcactccgtcagcccttttacattctggatatcattatttgtaatgcatatgttacacaaaatgcttggaaagatcagtacctacctacccttcctgatctgggccgtgatattacctgtagaaatcagtccggtaatgagatggctgcaatatcccaccggtcgttggaagagttctgacatcccagatgaatttctgaacttcaagttgtgtagcttcataggtaggctatcgtttacttttcgagtctgagccaacacaaatggctccaagaaagcctaggtcgatcagacattaccagtctaggtatatcaccttcatacctgaagcactttaataaataaacatctactcatatacttacaatcccagcgtgttacctgtgaattgggtacctctggctctgggagagaccatgtatctgacgacaaagcaccaacaagtccacagataaaatctgtataacgaagcttcactccgtgtctgccggctcagtctatcccccttacaggtacctgattcgttccaagtaccatcacccaagcgaaatcgcaagcccgagacgcttgatatcggtcccctactgactatgaccgctgcggagcaatattgaaacggaaagcgatagactagtgttacctatcgtcaccctcggcatcggcttgagcttgtgccagctgatgctgtgcttctatcctcattgagaaacttgagtaataatccctcgtatctcctttcttcaccgcattatagatgagccttttttctctttcttgcttccccgtacctataaccatgtggtcaccttcctcccatcatcatactccttcgaccgcctttcacacaccagccatggccaacaatacaagcatatttctcttcggagaccaaacatttgactttgtgccaaagctgcgcgagctcttgactgttcaggactgtcctctcctggcagccttcctgggccaggctcattatgttgtccgggcacagatgatccgatcgctgccgccgcaagagcacaaactctccaggacggccaacctggctgagatgttgcaaaagtatgccgacgggaagttaaacccagcatttcagactgccttgtcgtgtatatcccagctgggcagctttatgcagtgagtctcatctcagtctcttataagatgaccggacatactgaccatatccgaaggacatacgaagaagacagcacaaagccctacccgcgtgccaatgatagctacgttttgggtgtatgtaccggctcgcttgccgccgctgccatcagctgcagcagctctctctcagaactgctacccatagccgtccaaacggccttgatagcattccgtcttggcctctgtgcgctcgaaatgcgagacagtctcgagacatcggctcccgatcgtgcacgtccatggtctgttgtcgtctcaggtcttatgccacaagtcgccgaggcattcgtgaaggagttctgtgatgggaatgccctgcccaagactcgatatccctggattacagctactgccgccaagtcaacaactatcactggaagcccccgtgttctggaccagctgcttgctgccaagtcattcaacggctacaaaacaacggagattccagtctttgtgccatcgcacggcgaccatctcttcacgtccaaagacatcgatttcatcctggagactactgctgttgcgccatggtcgggctattcagccaagatccctttcctgtcaagcgcgtccggcaagttagtgtgggtggcaaacttcagagctcttgtcgagctggcactgtctcagtgtctcctggtacccatcggctgggacaaggttgagaccgaagtgcctcgtctactcaagtctcgcggtgttagcagcgctgtcatcgctcccgtggggtcatccgctcaaaagagcctgtcgtcagctctagcaacaggcggtatcgccaatgaaattgggaccgtgaccggtgggaccaacaggttttcccatcgccccggaagcaacaggtgcaagcttgccattgtttccatgtcgggaagatttcccgaggctcagagtactgatgccttctgggatctcctatacaaaggcgtcgacacgtgcaaagaggtgccacgtcgacgatgggacgtcagaacccatgtagacgacaccggcaaggctcgcaacaaaggcgccacacgatggggctgctggctggactttacagctgagtttgacccgcggttctttagcatttcgcccaaggaggcgcctcagatggatccggcccagcgaatgtcgttgatgtcgacgtacgaggccatggagcgtgccggcatcgtccccgatacaactccatccacgcagcgcaaccgtattggggtgttccatggtgtcactagcaacgattggatggagaccaacacggcccagaacatcgacacgcactttattacgggaggcaacagaggcttcatccccggccgtatcaacttttgcttcgagttctcgggcccaagctacagcaatgacactgcttgctcgtccagtttggcagcgatccacctggcctgcaactcgctctggcgcggtgactgtgatacagctgttgctggtggtaccaacatgatcttcacgcccgatggccacaccggtcttgacaagggcttctttttgtctcgtactggaaactgcaagccgtttgacgacgctgcggatggctactgccgtgctgagggtgttggcactgtcttcatcaagcgattggaggatgccttggctgacaatgatcccatcctcgccaccatcctcgacgccaagacgaaccactctgccatgtcagactcgatgacgagaccacacgtcggcgctcaaatcgagaacatgactgctgtgcttagcagtgcctgtgttgggcccaacgagctgagctacatcgagatgcacgggaccggcacccaggtcggggacgcggtcgaaatggagtctgtgctctccgtctttgcccctgacgaggaggctcgtcccaagaatcgcccattgtacgttggttctgcgaaagccaatgttggccatggtgaaggtgtctcgggcgtgaccagccttgtcaaggtgctcttgatgatgcagcacaacaccattgtgcctcactgcgggatcaagcctggaagcaagatcaaccgacattaccctgaccttggagcgcgcaacgtccacattgccctggagcccaagccgtggcctcggtctaacgggcctcgccgcgttctcatcaacaacttcagcgccgccggtggcaacacggcactgctggtggaagatgcacccgagcgccaggacttgtctgcaccagacccgagaaccaaccacattgtcaccgcttctggccatgtgggaaagtcgctcaagaccaacctggaacgactcctcgagcacattcagagtactccgaatctctcgatctctcagctgtcatataccaccacagctcgccgctggcatcaccttcaccgcgtgagcatcaccgggtccaccatcaccgaggtggagcgcagcttgataacggccatcgccaatggagacggtatcaaccgtcccaagaccaagcccaacgtcgtttttgccttcacaggtcaaggctcacagtaccttggtatgggtcgacagttgtacgaggcatatccggtattccgtgacgccgttgatcgcttcgaccgtctcgcgcagagccatggcttcccttcttttctgcacatcatcacctctgctgagggcgacatggatgccatgctccccgtagtggtgcaggtcggtctgacatgccttgaaatggcccttggtgacctcctccgatcctttgggctcaggcctagcgttgtcgtgggacacagtctcggagagtacgcggcgctgtatgtggccggtgtcctttcagcgtctgacgcgatttatgtcgtcgggaagcgagccgagcttcttcaggaacgctgtcagcgcggtacccattctatgctagccgctagagcttcagctgcctctcttaccgagacgttggaagggttgagctgtgatgttgcgtgtatcaatggcccgcatgatactgtcgtgagcggctcgatcgaggatatcaccgaggcgcaacgtgtcctcgctggaaaggggatcaaggcgacagtattgaagcttccgtttgcctttcattcggctcaggtgcagccgattctggaagactttgagaaactggcaggtggggtgtctttctcaaaaccggttgtgcctgtcttgtcgccactattgggcaatatcattaacgaggaaggtgccatcggtgccaactatcttgccagacattgccgcgaggcggtcgatatggtcaaagctctcgagacagccagagataagggcctcatcaacgataagaccatcatcgtcgagcttgggccaaaaccgttgctcagcggcatggtgaagatgacactcggaaacaacatgaccacgctatccactctgcatcagaatacagacgtctggcctaatctcaccaccatcctgtcgaccatctacactgctggtctcgacgtcaactgggtcgcctatcacgccccttttgactcggccaagaaagtgatccctctacccgactatggctgggacttgaaggagtactacatcccttacgaaggcgactggtgcctgcaccgccacgagatcaaatgcgactgcgctgatgccggcaaagaggtgcacacttctgcctaccaggtgcccaccgagtcgccccttcgcaagccatcaaagctggatgccacgaaagaagcctaccctgaaatcaagactacaaccactgtccaccgtgtggtcgaagagaagacagagccgttgggagccacctttatcgtcgaaacagacatgtcccgtgccgatgtcaaccctatcgcacaaggccacctcgtcgatggcatccccctcgccacgccttcattctacgccgacattgccctccaagtcggcagatactccatggcccgactgcgagccggacaccccggagccctggacggcctcgttgacgtgtgtgatcttgttgtcgacaaagcccttattccccacggacaaggtccccagctcctccgcactaccttgacaatgagctggcctcccaaggcagccgccaccacccggaaagccaccgtcaagttcgcaacatatctccccgacggaaagctcgacacggagcacgccacctgcagagtccgcttcactacagatgcccagcacaagtccctccaaaagaaagtacccgactacaaggccaagatccaccagctccacgatggcatggcgaagggaagatgcctccgatacacccgcaagagcgggtacaagctcatgagcagcatggctactttccaccctgattacaagctcctcgacaatctgattctcaatgaggcagaaaatgaagcaacttgtaagatgaacttttccgatgccaagagcgaaggggactttgctgcccatccagcgtatgtggatgccatcacccaggtggctgggtttgccatgaacgccagtgacgagacggatattgccaaggaggtgtatgtcaaccatggctgggggtcgttgcagatctatgagccgctagtgaaggggaaggagtatgaggtttacaccaagttcagcagggataaggggggtgatcttgctcacggtgatgtggttgttctgcatggggacaaagtggtggcgttctttgggaatctgtcggtaagttgtcgtgacgtctatttcttttcagtgtgtttgatgaagggtaagatgctgatactcgatgatacagctgcggaacgtgccacgaaaggcattgcatgttgtgctcaagtcagcacttgacaaaggcatccgtcaacgcggcggaaacccgacagctcctgcgaagtccaagccatcatttgttgatgtcaaaccaacgcctgctccgatgacgacgaagcaagcaacccagccagcgtcagcctcagacccggtgaagaaaaggacagcccctaaacccaaggcaaagacttgtgggacacccaatgatgagaagttccacgcggtcctgcgggttgtttccgaggagagcggtgttgctctcgaggagctcacagatgagagcaactttgtcgacatgggcatcgactcactgagctccatggtgattggcagtagaatgagggaagacttgggcatggacatggcctcggaattctcgctcttcattgactgcccaactgttggtgccttgagaaactacttgggtgcttcttctaccgcagcagaagtagaagatgacgaagatgacgaataccatgacgccgagccggttgcaagtcaacagacacaagacccatactttgcacatgttacaacccgagcttccgatgtattggcaacacccaccacggagtctggcgcagccttcgacagcagccagtttcctgccgcactgaagatcatctctgaggaaagcggcgtcgcgattgaagaactcaccaccgagacaatcttttccgacattggtatagactccctcagctccatggtcatctccagtcgtttcaaagaggaactcggcctaggcctcgactcagccttctccctcttcgacgacgtccccaccgtggccaaactctccgcgttcctcaacaacaacaacaacaacaacaacaacagcagcagcaatcttgctccggaagaagtcgcctccatctcttccaccacctcagacctagaccatagctcctctatccacgaaagcagcagcagcagcgccagcgaacccgaggatgacgacaacgattaccccccatccatcaagcgcgtgccacactgccgtccctgcacgtccgtcatcctccaaagcctcccccgcgtcgcaaaaagaaccctctttctcctcccggacggcggcggctccgcatcctcctacgtccccctcccccgcctcaaatccgacgtcgccgtcgtcggcctcaactgcccctacgcgcgcgaccccgaaaacatgaactgcacccacacagccatgatcgagtctttttgtgccgaaatccggcgccgccaaccccacgggccatatcacctaggcgggtggtcctcgggtggggcgttcgcctacgtcgtggcggaggcgctggtgaattccggggaggaggtcgggagcatcatcatcatcgacgcgccggtgccacaggtgatggagaagttgccggatagcttttacaagcattgtaatagtgtggggttgtttgcgaaccagcctggggggcaggggggtagtactgagccgccggggtatttgattccgcattttcaggcggtggtggatgtcatgttggattacaaggttgctccgcttaaagccatcagtggtaggatgcccaaggtgggcttgatttgggctgcggagactgtgttaaaggagagcgaggcgccgaagatgaaggggatgcattttatggtgaagaagagggttgattttggaccggatgggtgggatggggtgctgcctggggccgagtttgatattgtgaaggcggagggggcgaatcattttacgcttatggtgagtggactgatttgttgtgaggaatatgaagatgggatgttggctaacgaacagaacagagcaaggagcatgtcgggttgattagcgatctgattgaccgtgttatgagtggttatactgggtgagaagatatggggaagggttttgactgtgacgaagttatgagttttattcactgtatctaggcgagttgtgatatttgagttcgttggcgttttctggatggtcaggcttgaacttgtatctctgatctcttatgaccagttggggttttattgctaatcccttgtccttcgtattgctacctcgttcgttctggagaaatggttcattcgattcacgttaatgggcgtaacccctaaatatcttattgctcgctccactcccatcaccactgttcattcctcaactgtgggaggtattactcccggcggattggtcaagcaggttgctccagggcttgggcttcggcctgaggcccacttattggtgagaagataggaaaaggtttttgctctctggagctgtttgtttgagtatctaagaatatcatcaactattacacatctctgcggacgtacaacatcaacccacccggcccctaagattacacccgcccccactcctccgctaaccactccaaaaccagcatgccactgcccgcaccaccaaaacactcatcatcatcatcatcatcatcatcattatccctagagtcacaaactacaaataagcccatgctcacacactaactacttctcaccgtcacggtcgcataagcaggcaacccgggagcctcagcatacataccaatcgcgaaaaaaggcgccattgggccatacaaaaatgtcaccccctctctcaaccgttcccccaccctccccatcgcccccttgactaggaaccccatcaatggcatccatttttctctcaccttccccctcgccgtgacgcccactgcctttccgtgaagccgttccttagtcgtggcaagctcgcacatcgccgccccaagatcggcgtaactaagcgcgacgtcttgcttttcgtctgctcgggtgacgagagaatatcccgtcgggggggactcgtgaagcgtgggcgggtcgatgagtatgtaatttaacaacccgtttctggaagctggaatgtagaggttgcatgcctgttctaggtcggagtagctgttgtggagacagaaactgacaatggagtggactagcttgggcacttgggaggagagggcggggttgaggcttgcggtgcggagttggaggattgtggggggttggtagtggctcttgttggtgagcgagatggtggtgagggaggagatgatggctgatgcggtggtggagtggagggttgtgccggggttgctggcgttggtgccgacgcagttgaggattgtggttgctgaggttaggcagggggttagggagtggggagaggtggaggtgccttcgaagatgtggattttgaaaggagggggagggcgggatgagaggagggttgggaaggtttggaggagtttgggtttggagcggacgaggatgttgagttggattaggtcttcaggggggttttggaggaggtggcggaggacgctggtgccggttgcgccggtagctccgaggagggcgtaggtggacatgttgatgatgggtgagcttcttttggtggcgtttacctatggatagtcagtctctttcaccacgggtgtactgatgcctacatgtatgcgtggaataggtaggtgagtgatgggtggagatctggcttgctgttggttgatgaagctactgcaatatcggtgtacgatatttcggggagcgaattcgttggcaagtgctcgtcgtaccgcacaattgtgtcgctaacctgactcaactaagcaactttttgctttggtgtcaacacaaatgacgttatggacatgtattaggagtcatcgttccatcaagacaaccttgaagccatgcaagaagttaatggtagcagaagtcgcattcgccctttcctattcaccttggtctgcattcgtgtacatgctacctaatagtatcaacgcgtacatccaatcccttactttggaaccgtgacaataatagactgcatcttggagtcatactgatgaatctccacaatcttcaacccagcctcgctcaacagcgcctcccactcaggcttagttcgctcaacgcctcccaagctgttcatcataatcaaatccatgtacgccgactgccaaggcacgcccatttcaggaagcaccacgtcgtcgatgatcaaacacgagtccgggcccatggcaggaatgatgttcttcaagatctgcaaagattccttgtcgggccagtcgtggagcacatgacggagataatacagcttggcccccttgacagtctgtgggccgaagaagtcgtgctcgacaaactcaatgcccggaaccggcctggcacccgccagagtttgcgggatgtcttggacaataacgcggccggggaggttgggaaactttgccttgaatgcgatggcctgctggccaaaaccgccgcctacgtctaccaagacggcctcgtcgggtttggtggcaagggaaccgagcctctcctcgacgggatacttgtctacccaatgaactgggcgttccagtgccatcaggtggcctaggctcttcatgtgctttgggtgttgaggcatccactcaaagagcgtcagatcagtgtcgaaggctttctggaagacggtctgcttgttggaggtgatgttttggtacttggtctcggcgagaaagtcgggcatggcctgggtacacgggccgggaatatcgaagctacagaaatagttagcttctgccgttctggagtcgttgagagggagactgacagttggcaaatagcacccgccgcattggggttcgaaaagaccttggtgaaggcgctggcggtgtattcgtacttcccggtctctttcacgaggccaaatgctgccatggtacgaaggaggcgcgctgctatgcatcagtattccgagcatctgttgctgaacgtgaatccatgatccgtacccaaaagttgcgccgaggccccagtttgctcagtcagctggctcagcgtgacaggaatatcactctgtgtgagggtcgtgaaaatgttgaggtcgatgccaatcttggccagagccagttgaagaggcttcaagcactgttagccccctatatctgactaggtggatgccgtaaaggaaacataccccgctggtgagtctcataacaacatcccagtctgaatagaagccaacttgcagctcacggatgtagccctggatctctcttttcccggcatcctctgccttggcgtagagctctttgatctgattgaagatggactccatattgacagtatgtagtggaacagtacctagtgcgtggtggaaggtaataccgtggtattctgtgtgaccactttgggctgcgagagatgtcctcaagtagtatgggtctaaaccgggaaagggatgggtgtactgatttactccgagatatcggtaaaacacaattcggattgtgaagatctatggaagcgggtattcacccagatagcgatatgtccagggcatgtaatgatacaacagccccgtcaaggcaaagtaaatgccatcccacggaaatttgacatggtccgacgttggcagcacgctgacattccgcataccgtactttccatcctcactggccgctatctccaccattcccgccgccaggtccaagaaggagagcggcgtcttggctgtctcggtgctgatctcgtggccactctgccggtcatgaaccaaccctccgggcttgacaaagacggaagtcacccagccctgctgcgctcgcaggaacttctcggcttcagcgaggtccttgtagagatatgatacggcagtgctgaggatcgagtgaacaaaggcaggaacgtctccgcagaaggactcctcgagtgaggctgaggagagctggatgagtttcggaagccgtgggtgggagttgtgctggtcagcctcatgccgaatccgatcgagagccgagatgacaaccgatgccgtgtcccgagccacggtgcaacctggcatattgtccactattgcaaccacgaggaacacggcccgggtaccgcggatgcagtcggcaatgagcgagatatcgtcgagatgaccttcaaacaccttcacctgcttgttgttggcggcttcggggcagacacggaagagcttctctttggaccgacaataggcgttgatccggttgacgggtgattgcaggaggatttgcatcagagctttgcccgtgttgcctgtggcaccaagcactgcataagaaggcatcgttgatagctatcccgagccagcacggcaaacgctttgtggaatgagatgagggaaagtcgattatcgcacatgcctaagtaccttagctgggagggccattcctgtcagcaacgccaagtccgaggcgttctcggtgaccgatacccctccccgatgcagctgtcatggccggtacagtacctgattggcgtacaagttaacactctttcctcagcatcaacgagcaggtgaggtgctctgtcaagtttccgcttccaattcacaaccgcaatggctttcccaagagaaagatgcatccccaaagagatctccccgtataacattcaactttcgcctgaagacactccaggcaatacccacgtcaaggttttgacccaagaaagcgcagacaaggtctctgagctgctgatggtaaatcatgtacgctaccacactctctttgatgccgtgggcttccacagtaagttcgcaaacgcattgtactgtaaactgtatgaaacggcttctgacatggctctgtagaccacaccgtgcaccatcttctcacactttgggccctgggcgccactccatcagaggtgcaggccatgtacgatctcaacaagccgtaccaggccctcatccagtaccatccagcgtcagtagctgcggttaaactgaaagaacctgcattcttcaagcagtgcattggaaacctggactactaccaggactatgttcggtttttccaagacgagatcgccgtgaggggggtcccggctgtcgtgaacgagtacctgttcaagggggatgagttatccgacgacatttttgcgcgcatgcattctggctttctccatcccatgatccacctcggctgtggcctggagtttagccaaccctgtctcgtcgccgaggctctcgcagcgggctgtgttcatgacgaatggccagagtggttcatcttcccagtggaggaatatctcaagtcgaacccggatgtcccgtcaaaatcgctgctggaaatcgtcactggtcttcaaaacgaccccgtcattgctaacgccgtgacacctgacgaccccctcaacaagatatctgacggcctcttgaaaaaggtggccaaagagctggtgccatatctggcctcataccaagtcgatgcaacaccagaggacctccaacaaaagaccaccgccatgatacacacctgcgcgtacattctcggggcagcccagcatcccggcaaggtagaagccatcgactttgtcatgcttcacatgtccacgctgggaatcttctacccgacctttatggcacaagattggatctccaacgaaaacaagaagcggatgctgcagtggaaggcttggggagatgcggtgatgtatgccgggtgcggatgtcccaagctgtaccctgagagggttactgggtacacccctaagcgcccccaggacggctggccagaactctgtcaccgggccaatgtctatggtgacgatggacacatttccaaggtcatccgggctatgctaaacacccaggagctacccgagccggtggaaggattccccctggcgaagaaggatttcctcaagattgcgcatctggctttggactctgtggagaggatgctggagccaggacagtacaaagtccctgataagatcaaaaagactgtggcagaagaaatgcgacaagatgaggagattgttagggtaatggtgcggtgggtgcgttggtgcggtgtggaaggatcgtgggataacttcccggaccttgttgagaaatcacgggatgaggaggcagtggttggagatgctagaatcgctgcgacataacgtagtatcatcacttgtcctgtactgcttatttgccaagacataatccacagcctggtgctctagaatccgatttaaaaatagatacatattatgacctcttctatttcatgtagtatattactatatcgttattagccttatattaatacaagcgtattgcatgttatcccaggccgagaatcccactttgagaatcttactacatgctaccacaggcacatgttacattgcagatcatcgcttccgaccgtactcaagcttcatgttcttacggactcataaagcgatggatagtcccaccgctgcctctccagttctaaaccacctcgtttgaatcctccctatgcaaaagtaaatatagatcgaattacggtttccaatatgctcgtgacaacccttctttccgccatgtcaaccctttcaagggcggcacccaccacaaccaccgtcgactcaacagaactcggccaaggtccttaccactacgacttcggctggaccaaacccttcatcagctcctgcagcaacaagactgtcgatgtcaagttccgctggtccatcaaaggcctccaatacaccacctcttccacattcatgtcacccaccgaagaacaagaacagaagcccagcatcgagtcgacttacttcagcttcaacctcaccaaccccgccatcgggggcctagctcgctgcaacaccaccatgtccgggccgataccaaacgcgacccatgtattctggtgcgacaagtggctttcagtcgacgctgggacggttgggctgtatgggacccgtggtccacggcttcaactgaggtttcatgagaagacgctgttgcttaatgatgggtggaagtgtgatgagccagggcagagaagtaatggcgagtaagtacatcctttccttttgatttgacgatgacatggataccgcaaggtgttgacacaaagtgtgttcagcatacaatacagcgcaagaggccttgtagaactggaatactcgcagtgtactggggcatcttcagtcaccggtgactggaagcccggtcagatttattcgcaaaagacaatcggttgtcgcgctgaccagatcgatcttaagccgaattatctacttggggtgtagtgagttgccctccatgtttggttgagtgtaaacgtggaactatgtacaagctactgacgttgaattagctctgctgacccctttttcttggttattggggagtggtaaaatgttgaagtcctgcacgtctgggacacagatggtagcatctccttgcgtcacattgagatcgagcgataagagacatgatatatgaaaatcacttggaattcatttaagagcagctctacttgtactctactctttcagtcgaggaagatgccttgaacatttgtcccttgaaaaggggtgaataagggggtgcacagtatggccactcaggccacacagtgcccgcactgtttgggccacaacgctccagaaaaaattcacaacttttggctgcccgcagtgatgaagtcacacacaccccagctctcactttcacattcaatctcaaccctcatattccagtctgctgcctatctattgtcgtgagaatcaatctcgtgatttcccctcatttcaattcgattttacgtcacttctgaggcccccctcaaacaccgaaaatggcctcgatccaatttcaagaagaagaaatcgacgacctcatctacctcgcccgtgtcggtgacaaagacgagctctccactctcctctcaggaatcattgcccgccagaccaccgacaggatacccactcccgccgacgttctcgcccaggcggtagacgagagcagcaagaacacaaccctgcacatggccagcgccaacggtcatgttggtgagttgaattctctcatcctatccactattttcttacatgaaactaaaataatttttgtcagaaatcgtcgagtacatcctctcccggtttccaaccaccgacaaggatcaaaaacaagccttcctcgacgccacaaatgagttcggcaacacagccctccactgggcagctctcaacggccacctcccaatcgtgaagctcctcgttgaaaacggtgcgtctgttgcgttggccaatgacaagaactacatccctcttgacctggcgagcttcagcgagaagatcgatgtggtggattacttcctcaaggaggtgcgtgagatggaggctgagaatgcaaaggagggtcttggggaggctgtggcggatgtaaaggtagaagacggtgaggagaatgagggctcttcaaaaggaaaggagaaggagtcaagctgagaggaacgacgaatgataccaaaagaagaaaaatatgacatgaactgagaactgctctttgatttgttttgttattgctgtgatgtacccgccttactctggcttcagagcatacatcctaactggcaacaacccgctactctgaaatcccttctgcagctcaacctgcacgagcttcaacttggcctccttgaagatgcgtctaaacgtcgcgtcctccctggggtgttcttctgttagcagcaacatccctcccactcccccccccccccccccccaaaaaaaaacacacacaaacatacctcgtaacactactatccacctcatcaaaatcatccttcccacttgtactattattctccttcacaacaataaaccccccctttcccacatccaacgcagctttgcaccgctccagaaagctcaccagctggtgatctgtcaaatgccccacgcaccactggatccatatcaagtcatacctctcccctccatcttgcatctcccactgctccaaccccatattccacactttacccacccccgtcttccccttgagctcatcggtgaacttctgaatcggctcaatgacgtcgacttgctgggcgatgccatcgaggagcaaccccgtcgtcacacggcctattctatcgggatgttgtcagtgagtatgaattgatgggagacaaggtgaaaacaaacccagcgcccccctccaacgccctctccaccttcctcttcttcgcgccaacaccaagcttagccaagaaattttttgagccttggatatcgactttgctgatgtggggaaacccgcccaacatgccgttcacatctggggcaatagactcccaataggcgaggccgtcggtggtgttgatgagggcgtctgctgattgttggtcctgattcgacatcttggtgggtccgagctgttcgagaagaggtgacgaaaagaagcaaacctgatctattaaaagttctgctgaataccgtgaatactagcgtgagatactgagagataatgagggtgggtctctcagacttttgttgtcgttgtcaaaagtttactctgatgcagtttcagttgggcaggtggtgatgaaaattacatcgatgagacgatgcgaatgtgaaatattacgcgtaatttatacggtgtcacgtgcctagtgaacgaaaagactcagggagagagggttagggtacaaacattggatgtcaggaacaataagaatcggacacaaaaagaagagaaggacatggaatataagaaacattagggacccacaatggtagtgaatggttcggagatcttttccggtggctcgccgctgttattcaaggtttgttggccgtcatttgaacctgctgaccttggtatttcttatctcataagctggctagactcatactcctttggctttggctatggcctcaaagtgattcaccccgaaagtcaaaaatgaagctgggtaaaccacaaccacgtggctcaaaaaggggcaaaagatattcccctcgaccggaatcgagccggtgacctttcggtatcaataaattcctttacagccgaacgtgatagccaactacaccacaaggggtttcctggttgttgatggggaaggccaaagtggcacctatgtggggaccaaccaccgtcgactggcttatctccaagagacaccaacaacaccacttgcacttgaggcagcgaaagccagctgcaggttcccgtatcactagtccgcgtgcattctcgcgcagagattgtcatccagccaggtactcagatccccataactgtccacggcctgtatctcagctttgatgttcaacatcagcatgcgctgtagttcctgtgcatgttccaacccgccgccggagggcagctcgacagaggaaatggccctcaggatatcgccagctttctttcggtccctcaaagtgagagaggacactttgtcgcttggattttgaaaatctgacagcctgggtcttttggccggccgctgatgatcggagtctggcgcgagtaggttaataactgtcacgaaacagaaagaaggggacctgctcactttccaccaattgaggagatcccccgcctgtggttccatgtaattcttggtcctcctcatcgtcaactgctggactttgccatgaagagaggagatcgcgactcttaatcccaagccagcagagcgaggggacagttgcctcgttctcatgctctaggcgtctactgccattctggtatgttctgacaatggaaataccgtcagggtcaaagtctgcgagaccaaaaatcactagactcggccgcatggaatgtacaacagacaagaaccttcgggtggccaagtcagggaatcctttggcctggcagacagagaacttagttatgaacacatcatctgtaatattgaagccataccgtgatgaggattccgtgacctgctcgggagttctttgcatattgagctgcagcaagagttcggaaagttgccttgatcccatgtcagccgggccatttaagcgcgatagtctcagctgacctctttctcaatcaccaaaatccactgcacctcatgaaagccaatgctccggatctcgcttgtggatggcaaaagaataccctacgaccatcagcatacaacccttgtgtttgatcgtctcaggtaatgtctcacggtactatgagagagcccacagtcaatgacggaaccgtctcgactgatcaacatgaaggggcctgaaataaggcctttggctgtcgcaacctatgatcgttccagtcagaaatttcactcaatgagaagtaacagatgcctatttacaatgttcaaatcgcctcggccgacaccgagggtgaaagcaagattgtccaccatgacatcaactgcagcttgtgagccgaaaagatctggactttggtagtatatgtttctgattactcaggtgagtgagccaacatcccagtcttggaggtaggtcctcacaaacagacctcttggtgatcaacattcccgacagtaaagcctcgtgggaaagctcaatgatgcatagtaaggcttctatccacagaaccaattagatgaaatcgctcgatacgccccggttcactaaccaaatttcttcgcttcctggatggtacgacctgggaatctcaccacaccagcttggcgcgccgctggcgggccttgtgagcgcccggggcgtgatgctcggacagttctgtagggaatcaggatttcgtttccggtcgtgacagcatcaacaattgcttcgagaagcgactcgattcggtcgagggcaccgttgccagcgacagcgacgacattgaccgcgtcgtagttgacagaagaggcaccagatgaatcttggctgtgagtaccagtgccttgagaatacccctcagttgaatttgtcgatatttcgtccatggtgatcgggttggcgccgacttacaccaacatctgacagatgatgcacaagtcgcttgcttctgcactggggaaatacccaggcttttcggctccttcccattcttacttgcaattacggtagtactgcaattgttgccagcccagtgttccttcctcgtcgagttgacctgatcacacactgatctggcagtgctccttcccaatgtcatcggaaagattccgacatggatgaggtctctctcacatgcactttggtgggcccgtgcgtcactgccagcttgacgggtggatcccgttgctgcagcccctgaaattcaacggacgacgggtgatcgctgtggcccgattggcgaatccaagacagctcagtccacggccaaaatgtttgctggctcttaaaaccaactgttcctccgctctttcgtggtacggcaccataatttcgtatagctcgtcacgatgggaaagaaggatgctgcgggagtgtcctcggacactcaacctctcctcgagaagtcctccaccaagaagcgcctgagcttcgacctcaccgaccatgtcgcaaaacgccaaagaatcgaagagcgaactgaccatacacgatggcgcatgcgcgacgacaaaggacgccaatcatgggtgtatctcgaggacgaccaagctcttaaagattggccccagagctttgctgacaagtactttcttggccttcctgtggtacgttcttctaggcttttcagggctttaccatggtcgaaacactgctcgaaacactactaacaatgtcttaaagaatgcccccgatctcccaaagccgacgaaccctctcgatgcggtccgaaacggtctcgaattcttcgaaaagctccaactgcccagcggtcactggggctgcgaatatggcggtcccatgttcctgctaccgtgcatcgttattgcttggtatgtcaccaagacgccaattccctggtattacgcgaccgagatcaagaactatttgtttgcgcgcgccaatcccgaagacggtggctggggtctgcatatcgagggcgagacatcagtctttggaacatcgctcaactacactgtcctgcggattgtaggtgttgatgccgaccacccggtgatggtcaaggctcgcgccactctgcacaagatgggaggagcgacacatgccccccactgggccaagtggtggttggccgtgatgggagttgcccagtgggatatcgttaacccaacaccccccgagttgtggcttctcccagactgggtccctattgccccttggagatggtggatccacattcgccaagtgtttctgcccatgagctatctgtggtccaagaggtggcaggctgaggaaacggcactgatccgctcccttcggcaagagttgtttgtggaggactgggccaagatcaattgggcttcgcaccgcaacaccatcaaccccagggacaactaccatcctaagacgtgggtgctcaacacggtaaactggtgtcttgtcaatatctggaacccagttttgcggacacaggcgattgctaaaaagggcgaggagtgggccatgaagctcatcgagatggagaatgagaacaccgaccatgctgatttggccacggtgtcagggcccatgaacacggtgtgcctttatgtcaaagagggacccgattcctatgctgtgcgcaggcatcgcgagagagcccatgagttcctctggatgaaggacgagggtttgcttgccaatggcaccaacggtgttcagtgttgggatactgcctttgccattcaggctgtgatggatgctggtttaaccgaggatccccgttggcggccaatgctgatgaaggcgctcgagttcttggatgatcaacagattcgcgaaaatgtcaaggaccaggacaaatgctatcgccagcaacgcaaaggcggatgggcctttagcaacaaggatcaaggctatgctgtcagcgactgtgtttcggaagctctcaagtctgtcatcattctccagaagactccaggtttcccaaccctcattgatgatcggagaatctttgacgccattgacactcttctgacataccagaatccttctggcggatgctcgtcatatgagccccctcgcgcgggtacttggatggaggtattgaacgctgctgaggtgtttggcaacatcatggtcgagtatgagtatcccgagtgcacaactgcggtggtcacggctttgtccctcttccgcaagcactggccggaatacagaaccaaagagatcgagcgcttcatcgagcgcgccgtaaagtggatcaagactgcccagaagccacatggtgggtggtatgggagctggggtatttgctttacttatgccaccatgtttgcccttgagagtttggccagcattggtgagacatataagaacagcgattatgccaaaaggggctgtgactttttgatctccaaacagagagaggacggtggttggtctgaacattacagggtatgttctgcttttccattttgtcacaattgcaggatgctaacatgatgcaggcatgtgagacgggcgagtacattgagcatccttcaggatcgcaagttgtcatgactgcctgggcggtaattgctctcatgaaggcagactacccaaatcttgaacacatcaagaaaggtatcaagctgatcatggaccgccaacaaagcaatggcgagtggcttcaagaagccattgagggtgtcttcaataagagctgcatgatttcgtaccccaactacaagtttaccttcaccctgaaggctctgggcatgtttgctcgcaagtacccgaacgaaactgtggtttgaggacgatgggtcagagaaagaaaaagatgatgacatgaggcaagatggcaaaagcatatgatgatggtttggagacattcgataatgctttatacgtaatacttaattcatttattcccctttcagtcttcatacaatttcatttcccccctttcagtgccaccacttggtgatgttactcttgaggaaggcggtgaaaccattgctcgtcatggaccccacttctgcaggcatccgcaggtggcagaattaggttggctgcaggctgacccaagcttgttggtgtggtaccccgccaaagcttcccctggtcagaagctctcttgggcttcttctttacagttcgacaagtatctttgggccaaccagctttacacttctcattcaaagttccagcttcactttgtctgtcacttacaaagatcccttcaactacttgtctataacaacctatctccgcctccgttgatatcttctcatccatccatcaccctctccccagctgccatcatcgccaagacggaactagataggtacctacccgatcgacccgttccgacctcccggcaacttctcaccaggatggcggctacatcgtatgcctaccgtggcctcgaggccgtcgaaaagaaagattgggccgctgccgttccccttctcgacaaggcgctggagggttcaaactcccctctttggctgttggcccgctcgcacgcccacctcgaacttaagaactatgaggatgccctccgcgatgccgaacttgcgtaccacgttgctgccgagagaggatctgggagaaagcaaatgatcgacgcccagtatcgccgtgctaccatttaccacagacttaagcaatatgccgactcggactgctgtgccaaatggagcatgctcttggcagagggtcgcccagctcgtgaggatgacggggttgagaagaacgttgatgccgacgggtactacacggttacatacgaggatgcggttgccgataacgcgaaccagccggattactccatgagggagagcttgaaagatccaggcgtgaaagacccaaatgcaaagacgatcaagactgggtttgagtcacagtggaaacgagcgtatacgtggagaactgtcgttttggggattctaaagaggctgccgaagaatgacccagggcgcaaagtccatgtttccaagataccaccaaagccagagctgaagaaggtcgagaagaaggccgagcctctggttgtggagctggacagcgaggatgagaagccggttgcgaagcccagcgagcctgcgccgggaagtgtacccgatgagaagctcaagcttcgtaccgacttttaccagtccaaccaaaacgtaacagtttcactgtttgtcaagggtacgaagaaggaagagcttaacgtcaagttctcgaagaaccaggtatgccaatctgaacttgggcacatgctgatcggctactaacgggctgcaggttcaaatatcaccaattgctcgcgccgcggccccatacgtaaagcctggcgaccgcgaggcttcctcgaccttgcacctgagcggcgagatcaatcccgctggttctcgttggaccgccaccccatcgaagattgagctcgttttgcagaaagctacaccagggaagtggggctcgtggggcaaagaggaaatcggcatcgtagagaatgcggatcaagaagaggatattgaagaggtcaccccttcttcatccaaccaggcttcggctcctgctgtcaagcctgccgctgctccagcctaccccaccagcagccggaccggacctaagaactgggacaagctggaggagctggaaggggtcgaggacactgagagcgatgtcaatgccttcttcaagaagctttacaaggacgcctcccctgagcagcaacgcgccatgatgaagagttttactgagagtaatgggacagctctcagcacggactggagcgatgtgaaggggaggaaggtggagacggtgccgcctgagggtgtcgaggtcaagaagtgggatagctgaaggtggtcccgaggttgggatttattctcttgagaagtgggaccggttggaaggttaatggcagtgatagcgacgtgaacttttgtatcatgttttattagagtggtggataggggatgatggcgttgtgttaggcgctggcgttggagtgtttacaaaagcgaagcaaactgggctggtagtaatgaggaatattttttactttgatcgtgcaatgtgaagggatggttcagagatgagacaagtcggtcttggacgctctttggaatgtgaaccaggatatttatacatttgaggggtattcccaacaggaaggatggctcttggatttggaaggagcgtcaagaggccacttataggcctcgagggtagctcatgggacatattgcacgttgagaaggcgtagaacacttgaacaatgttccaagataccaagatctaaatatatctgcgacagtgcccatcttaccaagtgagctcagtcttttgcaagaagaaacaaacctgggcgtgtcgtgagatattcatcatctaggtaggctaattacaattctatgttctaaaaaaagggggtataatcaagtattcgcccgctcatgcatcatgctcatggtctaatcaacacgatccttacttgtcgatcggcagctgtttgcgccctcagccgcgaccggcgtcgacggccgcaaacttgtcccctccacatcatccagccgggtgacgctcatatccggacgtaccctgaaagtctgacccctccaattcaccgtggctccaagaaggacagcccaggtccagatgggaaatgccagaaactctctccccagccaagcggcaaaccaagtcaaaaacggcttcttcttgattcctcctgttcgcgtcgagcccagggcaaaagccggcgtgttttcatccacatcaacactctgcagcttatgcagcttggcactcagcaatctatccacgaccatccagacagtgacggccgagatccaaatggtaccaaacgctttccaagtaggaggtattccaaaaaaagagcggaaccaaggcaatgtcgtgaaggcaaaggccatgtggaggcacccgatcagagattccacacctggctccacaagcgtggccgttaacacggtccacttccgtactcgaagccatcgtacacggcgagcaatgtaagcggcaacagtcatgcccgacatgggctgaatagctacctcgccgtggacgagcccgtggttcttgaagcctgggatcttcgacttgaaaatcagatcgccaatcaggtggtcctcgcagatgtaggacgagaaatagtcgacaccccgcccacgagcagcatcggcggggggaatgagggggtttcgagcggggtcggtcaggcgttccaagtgagacttgcgaaacatgttgctcttgccaacgacacagggggcgataccaactgtattgatggcgctgtagaattttgcgtgggtggttgccatgaacatctcttcgagcctgccgccatagtcaaggaggctctttggcgcgctggtgttgataggccccgacagaagtgcctgttcctcttctgtcgctgtctttggcgtctcgagatcaataacgagaggtagttggtggacaaacttgtagggcttggtgcgagttccatcgggcaagaaaccgtccagcttgtccaccattcttcctgccgagttggccccaagccaaacattacagtctgctatccaaataatatcgcccttagcctctcggtatgcgcggctgatgttgcggattttgggatttggcccaagcttgtcaatgtgcccgccatcgccatgcaaaacaggatcttgctcctcaacgaacaccttggcgtcaaagtcaggataggcagcgacgactttctgtagaaccgggtaggcgggatctctcgtcgaatcaacgcataggtagatagtgagcttcgacttggggtaggcaagctggaaggttgacgcgagacattcgtagaggccagcctcggcgccctttaccggtcgaatgacggtgatgtgcggtacttcatctttctcgagggttggggagaaaggttttgggtgaggagctgagttgtttcggaggctaaagacacaaagaggtggtcgttagtaaacaccgaagacagtaccatggtgggacgtcaaggtcgtacattttgcagataccaattccttgaacggaaacgatgatgcaggtccaaacgaagctgaccaaggccgcgccctggacgatcatcggcatttggtcattgtgagcaggcatcgagatagaatagcaacgcgcgcagaaacttaggggaaaaggaaaggatcgtgatcgtgatcgtgactgtgatcagcagctttgctgacggaagatttcggtgacacaggatataataaaaacagaggcgcatggctggctggcaacaagtcgcatgtcagaagctaagtccccatgtggggcgtcgctgccctctctgatcgaccctcgcaccgcgaagagtaaccacgacacgcgatgtgatcagtcattgcaggcatgggcgcggtaggatgagggcattttgcgcatctccggaggcgccggagacattttctggtagatgacaagttcgaaaacaaagattccggctgggccgttggatttctgatgacggtgctcggcggagcttcttcagagctccagtgagagcccccgttaggtttggcgcaacggccggggggcacctggaagcttgttccagatgttccgataaactgccggccggcaaccttggagtgacccacacttccagggcatggcgagtgccttttcgcctgacaagtcaggccaaatgcagaaaatttcgggagcttcaaaagcttcccacaagctcttgtcagctgcatcccactttccacttccattccaacaacaagtcgcacaatcgcaacatttctttccaccggatgtgacagaacaccccgtgtgcgatatgtcaacttgatatctttgtttgctgtcagcagatatcttttggaccgctgaatgggccacaatctgtttgtacctcgcaagagtgagttaacacatcattcccttttcttcgacttctaccgataccattgccctcgagtgaggccaattggtatcgcacacattgcgatgatgactactttggagcttagagcaaatatccttcagtggatgctcaatgtatgcccatgtattagactacaacggtatctgagcaatgtcgagtcaaacaatttttggggggatcatgcacagctgccatcttgactgtatactgacgtttcctagctcaggtcgatatgagtgacaatggcgacggttgaacctacagtcagtcccgcgactgcgcctcccggcgactcgagcaaaacagtaaccacaagggccccagctgggccgccgaggacgccattgaatcaaatctatgcgctgcccgcacccattcggaccttccctttacctgcgttctatccaaacaacccaatttctctttttcacttggtgtacgcctggttgagacaggttctgtccccgccatccaaagaaccgtctgtcatccatattggagtatgggatccagatacatgttctgttcatgtcccagacccagcgtccatccgggctctctgggagcagggattctttggcaaaggaagtctgagtcgtagtgagcctaattggctgaagagggagctcgctcggcgaggttcgcccgaaggaaagacggtgagcgaggttcgcacagagtcgcgtcgtgaggaacgccgccttgccaaatgggaaagagcaagggcagagctggaggctattgaacgccagaggcttgccgaagctgccctccaacaccatcaccggtaacaaccgaaccccgacctgagaccaagagtgcccctgaggaagaggccgtgtctgccaagctccccccgttgaagctccctaagcctgtggtcaagtcattctcgatgccgaaactgaagaacccagtccctactggactaccctcgccgcctctggagaatggagtgtccaacggtcatgtagcgcacggaaagccccctgtcggacctgcagagattcttgcgttgcctaactcgttggcgaagatcaatggcaccctgaacaacatgatgcttacagagctgagaccacccactggcccagcagagttgctggccctgcccaactcagcagcagaccttgtcacgaagtcgggcttggcatccactgtgaatgtctctggcgaacaggtgaatggtgtcagcccgattgatggcctcagtggtcatacaggaaaggcgagtgcctttgcccacacggtaggtgacgctcaggaaacacacaagcccatcttccccgaggacttgctacccacaccttgctgcacccctaccaaacggtcagcaaccggctcttccgtccaggataaagaagaaccctcgcagcccgttgccaaacgtcaaaagagcgtccgtttctctccccaagtcgagtccaccaccttcaaccgtggtgatccgcccagtcccggtctcgtgtcaccagccgagccagctgccaagtcgaatagctttgctgtccctgctaccgctctggagattcaggataaggaacacttccagctcgcgcccgaagaagccttctttctcgccttctcacttggcgctctcaaggtcatcgaccccaagaccagagaaccaatctccaacgagcgactgctcagtcttttccgctcctattcctacttccccccctcggctggtcttcgccctgacgacccgtttctcgtacactacgccgtttatcatcacttccgctccctcggctgggtgccacgtcatggcatcaagtttggtgtcgattggattttgtaccaacgtggtccggtgtttgaccacagtgagtttggcctgatggtcatgcctgctttctcggatgctcggtgggaggaatacgaacatgaaaagccgaagaagtcgtggtcttggctgatgggtgtcaaccgtgtgctgtcacacgtcttgaagagtctggtgcttgtttacgtcgacgtgccgcctcctcctgttttcgatgaggcgatgaaggagggtggcattgctgctgctctcaagaagtacaagatacgggaggttatggtcaggagattttccgtcaaccgcaacagatgatgatctttttttgtataacctataaatgcattgggacggcgttggtattttcaggttggattctgtacaacaaaatggcagcatggaatggcatgggaaaaaggcaggcagtatttatgcatggacctcgggtcccaaatctgaagctcgtttcatcatcttgtatctcttttggtgcccgccttcgcacatgtttgccttgccccaagaacgtcaattcctcttcctcctccccaccatccacaaatccctaaacctcgaaccctcctgatcaacaagctctctcggcttaccatcctccacaatcctcccctcatccataacaaccaccctgtcaaaattcatcaccatacccagccgatggctgaccatcacaatggtatacccagcaaactcatccaaaatcatcctctgcatcgcctcgtcagtatccttatccacactagaactaacctcatcaagaagcagcacccctccctcgttttgcttccccttgtctctagcacggatccgtcctctgagaatcgccctcgccaagctaaaaagctgtttttgtccctgagacaacgtgtctgatgacatgggcgcttgcaggccgcctcgttccgaaacaaaggactgccagagggagacaatccccaacacagagcgacattcttcttcggaggcgagcccaaacgggtcgaggttggcttggaaggaggttccgtctgggaggaagactgggtcttgggggacggcgatgatgcgctggcggagggtggagcggtggattttggtgagggggagggagtcgatttctatggtggaggcgggggaagaaatagggtcgaggaggcggaggaggaggaggaggagggaggatttgccgctggtgatgttagctcattgtcaagactggagacgagtacaggggggaagggggacgaacctgccgcttctaccgcagatggccaccttctgacctggaaggatatcaatgttcagatctttgagggcgaagttctggccttctacccccggcttgccatccttgtccccgctgtaacaacaactgtcaaggctggacctggaaaaaagcgtcaaggggggcggctaccttcactcatgatctttgccacatgagacgccaccttcaccgacaagagccctaccagtgacnnnnnnnnnnnnnnnnnnnnnnnnnnnnnnnnnnnnnnnnnnnnnnnnnnnnnnnnnnnnnnnnnnnnnnnnnnnnnnnnnnnnnnnnnnnnnnnnnnnnnnnnnnnnnnnnnnnnnnnnnnnnnnnnnnnnnnnnnnnnnnnnnnnnnngtaaatttaaaattatctacttaaaaagaatagatcgataattgaatatttatttatagggttcgatgcatactacagaaacatgatcagtgaggatgtgaaacaaatctattcctttatcttactgtttaactcttacctccaatattcttttgttatagagtacctagaaacaattatatagttatcatgactgtaagtagaggacaactgtcttattagtatccccagtggcgggccactcctcccccggcagcaaatcctctccctccctattctcactcctaaccgtctccccaaacgccttcaaccgactgacagcaccaatcgacgtttccaacatcgtgtaaaacctgataatgtacgaaaacgcctccccaaagatcatcagcgtcaccaaactggctccagtaaacgcagtattcgtgcgcatctgcgtcgacagggtgatcaccgccactgccagcacagcaacaacaatctgcagcgtaaaagccagccagcgctggatcatggctaggagatacgccggtctctgagaagtgtcgaggaggatgtcattcttcttgacagactcaggcacccagccaaaggcgcggtatgtagcgagacctttgatcgtgtcgataaagtgggagcttattaaacatcaatgtcagttattcatagtcaagattggtttcatcctcaacgcgcgcacgggggggggggggggggtacttactacagcgggctcttggcctccaaatccagcaatcggatctgtctcgacgtccgcagataaaacttttgaatcccgtacaagaccaccgccaggaacgggtaagcaacggccagataaggggacgccgtagcaaccactgccgccattccgaggcagttgaagatgtacagtatgagattgacaagcgccatgggaagctgcccgtcgaccaaagtcatatcctgtgagaacaagttggtcacgataccagtatcggttgtcgtaaagaacttgagaggcgcgttgatgaccgttcgaagcgtttcgagatggagtctagcccctgatattgtgatcatggaggtaaagaccaccaaagccgaaaggaacagagacatcagtgcacccaactggaaaagcgcgtataatccattgtagaacgcattggaccgctgtggctgaggcgatgcgacatcctctgaccagaacttcagccagattgtggagaagttgatgcagaaaccccagccgaagcctgccatgatcaagacaataacgccaaagaggttgaggcgagcgagataataccggtatatcgtaaagtcgcccgttgccctcgtcttgtccgcttctgggctgaaggctgtgaccttattcggggtcatcttcagagtcgtgctcagacctggtttttcctgtactgccaaatcctccttcgagcttgcggcatcgcactcctggacacccaagctgttgacgtacatgtcattcttcatcagctcctgaaaggtcccctgctcgacaatcctgccatctgaacccagtgcgacgatatggtctgccgatggtaggtgtcggatggagtgggtgcaaaggacaactgtagctcctctccgacgtaacaagccatccggggagaagacacggcgaaacacttgttcctccgtgtcagcgtccaggccgctgagaatgtcgtcaaaaaccaacaacttcgagtccgtatacaaagctctggccatcgacaccctttgcttctgtcctccactcagggatatcccgttgcttccaacattggtctcgtcaccttggggcagaagttcgaggtcttggcgaagcacggtagcttcaacgacttcgtcaaatcgttcttgattgaaggcgtcgaagccaatgatgttctccctgattgttgcgttcgagaggtaaggggtctggtcgcaatacccaattttgcggaagcggcttgccacatgaagtttacctccaaatacaggcacttcgcccagcaaagctttgcagagcgtcgacttgccagaagccacgggcccaatgacgatggtcaaactggagtgtgggatgcggatatcgatatcatgaagagcagttttgtcgttgtcccaaccaaacttgccatccgtgatctcaaggccggggtcggcgtgaacctcaacactttccgaactcagctttgacgtgggtgagctggcactgcggtccataaggatctcggactcgcgaaagtcggtgcgataatcttgtgccagaaaagtctgaatgcgattcagacacgtcaaggccgccaggaaacttgggatatgctggaacagtgatcccagagggttggccaacagcagaatgtaggaaatggacgtgaagatcgtagtcacatctaatgtcctggaggcaaaggcaaaggttacaacaggggaaaggcacaacggagtgtaacccactgccgctgcataaacctggacgatccggaatcttgccccagccccgagctcgtccaccctcatggcctgaatcgactcctcaactggagccgagaggccagatatcttgaggtgcttcatctgtgtgatcatgttcgtggtgagccctactcgcttttgtatcctctccatccaagccttttgcctagggccagtaagcttggcaaggaagaaggagcagacaacacacacgccgacgataatgacaggggcggtgaaggcaaccccgattttcctggacagtaaccagcaggcaaagacgacctcgaccatgttggcccaaaactcgtgcatctccaagcatccgaccaaaacgcgttcgatatcggcactcatcaaggtgagggcggccgaatcgtcggcagctgagattctggcttcggttgtctttctgtacacggcagcggcaagtaggccgcgggtcatgtacatggcgcgttcttgaaagtaccagtaaaaagctgatgacactgccataccgacatagataaggagtcccgcgccgatcaatccgtatccaatgttcttcggactcatttcgacgggctgttcaaggtatcccaggagtgtttcgatgaggaaaggttggcaaagctggaaggccccgaacgcaatacgaggtccgacgggcaacaaaaaggacacagccaaagctttcatgactgcctttgccagtccgtgctgccgctttcccagctttgtagcctcgagattatgaccagcttcagcgtacagcttggcagaagcgatattatggtctaaggggaagagatcatcaatggtgaggacacctcgatatcccctcaaaaacagtttgttgagccagaagtatgcaccaagaccgtagagacctgctgtttcctcgggactgtgggcacctttttcccattgcagaatccatcttgacttggattgggattcgagcacaataagaagagccctgatagctacgccaacagtgaagatgctagcgtagttgagctcgtcatgattcgaggatgccagccatatggttctagtctgcgagatatccaggagagtggcgataaagagataagcgttcaggaagatggatggacgtggtgatttggtgtgttcgagggaagagagtagaagcatgcaaatactagatgtgagagccaaggcgtcggcaggaatgaagtatatgcccaatttccgtgattttgcaatgctcaagactagctggcagaacacaaagatgccgtagatggctatagatatctgttgaaagaaagaactgtcagcccatgatcaaacagggacacacttggcagccggatttctcaccagcttcaagtaacgcaaaataacacctccaacaatacctggcttgcggtgtagctgaacgattcttggtagagaaagtgcaatgaaaatggcagctggaataatggcgagaaatatcttttcaaatttgagtgtgaagtcgaaatcccctcggcagccctggaccgagggtccaaacgacgcgtcgtcggtacaggttgcgaagtccatgctggatgatgatatcctcaggtgggttcccgatcaagagcatgtttcgagcaatctctacagagaatactcgaagggcggtgtcggcaaaggcgcctcaatatcgcggttcaatatggtggaggcggggttcctgctgcagtccgaagtccagtgctttcccgtttctcgaattatgctgccaagaaaggaaggtagttgctacctcacgagatatgcaagtgcaaccttcatttgttcccaaacttccaacttcagcctccattgcaatatgccatatttccggaaaaatccgaaaagcttgtttctttctgatcttcctcgtagcgcttgccctcttgccgaggggacgtgaccgatagaatgggcaaaagcctgttgttgggcggtttggtcggtatccatggataaatgtgattatggggagggtttcgaccggggaggaggaggagggttatattgagaggattggggattttggtgaggctagggaggagcttagagatggagggttaggaagggacgttgatgctggggggtcgtcgccgttggaggtggactcgctgtgacttgtcttgtcttgtgatcctgatttggtttgggcgtgatatggccgacattgccatgggcatgtcaccagccagatttcaacatgcggaaggtcagtcgagcccccattagatatacaggaaatctcgaatgtttgccagctggagctgacacgcgggcaaagattactagaagaattccgcattcaattatgacagccagaaaggcaacttcggtgacaaagagttagcgtactatcacttcacctatatggtcaacttcttaatatatttgaagtccaatctccagccaccctctcgtcgtcgtagctcttagtacgacacgatgctcattgttcgatatcaggaactgaaacagagaatcgaaagcatgaaggagaattctctggaaggcggtggattgtaaagacgaaagccgaagacaatcctggaacctggttgttcaacaaagcaggacgcttacgagtcacttgctgccgaaattcactgcgggtctctcagttacgggcggtatcttgggcaggagcgattgatctctgacggagccgtgctattgttcctgagcaagtatatattgagcgtctcttttgagcaaactgctgctctctcttttgttgcctaaaaggttctctctctcttcaccaactcgatcggaaccaacaccaacaactcaaccaaggaccaacaagtctaccaatatggtgcccaccatcacccgcctcgccggctttctggctctctttggcgtatgaacatcgtcagctagtcttccggaacaagtcgctaattcgtgtcacaggctgttcacagcgcccccgcttcccttgaccaggccactgtctccattggcttggagggccgcgagattgttccggtccagtggaacctccccatcaacatcaacgaccccaatggcaagaaggttgctgtcaccggtaccttcgaagaggcagtcgccaggatggaagcccacttccctggttggaacgaatcttttgtggctcagctgcccgccgtccagctgccctcgcgcttcggccttagggcggacgatgacccggagttgggcaacgtggtgtctactgactgcaatattcccggggaggcgcagagcgagtatcgtattggccagggggtctcgtacttgcgtggcttgtcgggcaaagcgagcaacaatccgggcaagtgtggacgtgtcagctgctcctatcacactgccatctattggtgcaatgaggtacgttttggtcaccctgtgctgtaagctttgatgtctgtttactaactgtagaccaggatacggtcgacaaggaggtcgagtggaacgccattgctgatggagcatatgacgtttgtaggaactgcgagaagcaagatgacaagggagtttaccatgccaagggcacggtgacattcaaggagaagttcagtgtcactgtcaaggaggactgggaaaactgctaaacgcagatgatggtattcgcggctatctggcaatggaggacactgagatatttcgactgttgccatcttcacagcaattccaattgttctgtgtgaacctctaactcaactctaaggacccactgttccaggggaagaaatgtattggtctgaaactagctccgcggagctccagggctgagctagattcactagacaaaagagtttggcatcgcttatctcgggccgggagatcttcgtcaaagttttctcgtcagagcctttttttgtgaaatgctgcttggctttctgttggggggacccctcaaacccccacgtcgagctgtcgcccaagctgcccacctcagtgcattgggtgcccaagctcccgcccgtggtccaccacctatgcggcattggatacctaaggggttgcacgccattagcgcccaagatgactcctgaaaaaaagactctgtcaagggaagttttcgctgtcaaattcaacgaaaagagaaaaaaaaagaaacagagactcctcggctacagatatcgtcgtcaaatgtaaaagtaatagtaccacttgtacctccacgtggagggggtaattcgaacgtgggccggtggagattgggcgtgggggtgcgccaaagtctggggtaaactgccccgcgccgcagaggcgcccaggcccagagctgggagctgcccggatcggcccctgttgatggaattcgatgctttatcgttctctcgaaacattcgagcctgtcattcagttttcttgcaaggctcgttcagatgtccttctttcgctgcagatagagagaggcgcgcgctgcggccttgtccacgaatttcacgaccccaagaatgagcccccgtctccagtactagctagacgacaacgatggcgacccaacaaccttctcccccgcagcagcctcaaaatggcatcgaaaatggcgccggcactcccacggccacatacaaacgcgcgagccgcaagggagcgccccgtcgcttcagctgcccctacccgggctgtgacaagctctactcgagagccgagcatctccagcgtcaccagttgaaccgtgcgatctgctgtttcctgcgcgtgtgcgccatcacctgtagctgaccaagacctcagatcagcccaaggagatctttcgttgcgatgtaccgggtgtacgtttgacccattgatgcaagacacacaggacactgacgatgctgtggaacaacagtgcgaacaaaagtttgtacgagccgaccttctcgccaggcacaggaagaggcattcgtcgtcgtacgtaccccgaaaccgaatgcctagcttcagtgccgtcaaggacgagtcatccgccgcatctggaagcgccgttctgtcacctactcctggcgccgaaagtcgaccgtcggttccgaatgcccctcacgatgccgccatcttgctggcccccgagccgagaccgcgccagcctcatacacttccaaatcctcccccgccgagactatctacccatcagcctggttggcacccccaaatgcccgagatggagtgtaacataatcaggcctaagccagggtattaccctcgtgaggagaggccgccacagccgcagaaccccgtgtcgtaccgcggcgtcgacgtcgagtttccccacgacgatatttcccacgagaattttgctgtctggctgttcgatccacacgccccttatggcgacttcagtgtgtctcacctcccattcatggatggtgggctcgagtcaactctgaacaacaacattcactacgactacgagtcactgaccagtggtggccggtcacagctcgaaacccctccccgcttcgagaacgacgagcttttgtccgagttccgaagacaggaagtactgcgctggttccattctttccggcagaagcagcccaaggcggagcctctgattgcgagtctggcgcagcagaacagcagcggtgacatgcctgcactgagtgtggagatgatgcgcgattgtctgcaggaatactgggatcatgtatctcctcgattacccatcgtacatcagcccaccttcttgagcaaccgctgttcaatattcctcctcatggtcatgatatcgctcggtgctatttctctgcgtggacgggacacaaatggaaacctgccagattatggtggctttgccgatgtcatgatcaccggcgtgagatgggagattgtaacggcggaggaagcctccccacccgtggcgctctgggtcgcccaggccttgctgttgctggagttttacgagaagatgtattcttctcggaagctccacgaacgggcgcatatttaccattcggtggcactgacactcctccgtcgaggaagccccttgattgggcgttcgggaagcgagtccccgccggaggtgacctcagccgatcatccacacggggtgagcctcgactcccatacgtggtggtgtcgatgggcggaaacggaagcgatgcaccgggtggtatttgcggccttcatgatggacatcatacatgcagcaatgtttggccacgctgcacagatggctccgcatgagatacggttgccactcccctgtgatgataacctctggaccgcctcgaacccggatactgtacggcagctcgatcagaatctccggatgtatggtgtaaagaccatttcgtttctggacggcctgaagcgtgcccttcatggcaaggaggtcaagactcattcattcggccggatgatcatcatgtgtggtcttctcagtgttggttggcatctcagccacagggaaacacacctcaaatggctggacttcaccaacccaccgagcgagacccaggacgggtggaagaagattcttctcaaggcatacgacgactggaagtacagtttcgacgtggcgcagggcacgacggggagtcctggagttgcgactcctgtttcccagccctctggtgccaacggccccatccacagcgccgctgtcctataccatcttgctcagctgagcttgcacgtcgatattgtcgactgtcaggtgtatgctggagccaggcgtcttttgggtaggaaggtttcggttcgggactacaccaacgttgttgctcgcatgaagcactgggcaacgttgcctaccacccgccacgccgtgcttcattccttcaagcttcttcaccgtgtgctggtcgacccacggagaagcagcgggagcatcagcagcagcgaccgtgaccgcatcggtctcgggggtgttcacctgccccccatcgaggtccagtcttattcctgccgcagcgagcccgaccctcaccggccatgggtcatgtactacgctgccctgtgtatctggtcgtttgtgcgtgctatcagcaagcatgactcggtccacgacatgagcagccatcctacttcgccgtttcggccgccgaaggtgttgccggttaattatcggagagtgtcggcttatttgtcgaatgttgcgaatatgaacgagttgacggaggctacggcggggatgttggtggatggcttgtcggatttgttggaggcgctgcattcgatttttgcggaggcgtactcggagttgttgcatgaggcgcatgatcggttgaagatttgtaaggagatgttggcttctgttggggcgtctggtccgtgaagaggattggagaagatgtgtcttgggtaagggctggaatccctggggaggaagtgcgtatacccctttatgtgtcgacttgatttaagatgacggtacgtcgccctcggttgaacatgtggaatattgtcactaacaagtggatgcacaagcattggatatggaacatgcatgtatcatcaattggtatgggaaggcgatgtgtatgacgccgtggtttggtagggcaaaatcaggtcaggtattggatgagggtaaacagtccgagccaaccctgctgggtagactcttttaaatacaaagtttcttggttcaagcgactgtcacccctgtgaatgaagttcattctcctctggctggccatcttataggcggcggcggcgagttcccaggtcacgcatttgtctcgatgcctctatccaatttctgtcgccggaggccacggaggtaaatggtcctggggtgtttggcgtgtcatgtgtaggtctatggactttggaccgtatcacggctttgatcttggggtgcgtgatttggtatgttgggatgggggcagaggggatgttcatgaagctttcttgactaccctaggaggttgactaccctaggacgtcttctcactgcctaccatgaaagatccttctctggcttttcggtccatttagcttgcagtgactctcacttccaaaatcccttcacagacgggttaggataccaccagcttctttccatctattccgtcacgcaggggcacataacaggccacatatcaaggtcaaagccaatgcaataggtgaaaatggccgagacttttcacctgtggagacctgttgattcaatcttggccatttcttccacaggcgccatggcgggcagcgcttctggatctaagcaatccaaagtctggatatcgtagagtcggaaggcttatcttcattcatgccactgaaaactttacatcagccaccagaaaaaaatgtctcgtatgaaaaaaaaagcgaggttccttcctttttttttcttcgtcggaagcagcgtccatcccatcaccaacctaggcagcacatctgtgacgttcgtcaaccgacaacatcaagtgtcaagacaacattcgttcgaagaaaaacaatcaattcatcactacctattctatcccggtatattgtgttgttccaccaccgcaacaatgcccaaacccaaccccaaccgcgtcaccaagccgaccaagtccaccaacccacccttccctcccaccccccgccgcccaacccccctcctctcccacctcaccccagaacaacattcagccacaataacctcccgcctctcaggcgcccccgccacaggcgtcatcccccagggttacaaacaccccatctccgacctcaggtacgacctacccgaatatacctgggattccctcctcctcgaattctaccgccaaacccaagattcctacatcatggaagaagagataaaagccgaaagcgcaaggcgcaacatcatgggtgaacccccctgtcagaaaacaccagaagggtttgtccccccgacttacgacccagagtatgacatgccagattacagctttgggacgattctggagaggtataaaaggcagaaggaggagagttttgtcacggaggcggagatcagggaggagcagagggggaggtcggagagggccgggaggtggcagatggcgaggagggaagaggaaaaggaggtggaggcgatgggggaggagcagacaccgcctgctagtcgggatgggtctttgtcttaggagggcagagggacgccaatggcggaggggaatggtaattaccagctgcagcggcaatgtcggtgtgtgatcaccccctctcctatgcctcagcaggttgttgctgaccggcagggataccaccagtatgctcgcccccttgccaccccgcctgacagagaaccggataaggagacggtagagtgggatgagtggatgtgcagacagctcgcggcgtatttactgaatggcacgcccgagtgaggtgtccaggggggatagtgcgaggagagaagagatctgtcgacagcgagcgggattcggttgtatcaacacccgagggccaggagaaaccttggaagcttggagtctcacggttgtagtgtaagttccagctagtgaacgtttctgtgtttgaggctgttagtggcgccggtttgcgcgccggttgagcctgaggctcgacgttgagttgtgggggggactggaaggagaatgtggaggaaaggtttttgccaaagggcaaggctagcgtgagatttcgtggacggttagggtgtggcttgcggattatggggtttggttgttggacaggcttcattgtcggatggtacaagttggtctaggggtggaggttggatgagatggtttgggttggcgttgatgaagttgagtttggtgcagtggtgcttaggcttatatacccgctcagcctcagcaatacaacacaccaagtggtttgacggggttatttggcagtttcggagtcttcctcacgtttcttgcaatacccctggttttctttgtaatgtcgatttagttcatcgtcacactatatcaatggggacaaaggttgtttcaaaaatcaccacatgtgataatgatatgtaatgagtggctaatgatgatcatcctgacaaaattaaacaaagaagagttcatgaaggagtgtcggtaaatctgtcatatcttatatccatccatccatcccaaccagcggtcccaggctcgtctcaagatgtgatcatcaacccataaatcccctattcacagttccccttattcacagtcctcccagtggcttgtgcgcttcagtgctcggagccttgccccgttggtttgaggagcatttagcaaaagctgcccaaaacgggtcccagagcagggagtgattcgacgcagctgcaaagctgttgaatgttagagacgaaagagctagatatcggccaacgaagaaagggcttcacgtacaggagcgatgttggtgacaccgccaaggcaggctgcgatattgctgaggttcaaagttggaatggcaccaagcaggcaaagagcctggaagagagggatgccgacgaggctgttgacgcaggtgttgacgtccactggaggaagggtgacctggcggtcgacaaggacgggggcagtgtccacctgggcgggggcagcaaggccggtggtggcgacggcgaggggaaggaagatcttggagaactgcattttgatggtggccggtggtaatagacattgagaggatgtaggtactggtggtaatgatgttgttggaaaggtggtaaggatacttgaaggcttgaatgctgatggagagaaaagggttgaggtgttgtcggggatggcgtgcgttcctttatagtattttccggtctccgatcatcggtctccctcatcggatcctgtcctcccatggaggtgaagtcggatacggagcacagcgcaacgtgacttcggttattggttcagctctcttcgaccaccaccatcctttggagttgatgtcggaacgcacatctcaagggggttctgaaccccacctcgcatcatgaggtgccttcgtttccgaggcctgcatagtcacaaggcggtgctcaactggagtatcgacatcggcaagtcgacaacactgtgtggtggacgaaagcgaaccctcctgcaggatgcatctttttcaaggacaacttcctgaacttgacttccaatagaattctgagaaaatcctacagattagtcaaggccatccatcttcacgcatatactgttcctatctggtagtgatagacagcatagctgggaacaagacactcggtgagcaaccacctcgtgaataggggggtgcctgacagggcaaaagaaaacaatggcacctcggctggggtcggcggcagcttgcacagaatggctcgcttcggcacgaacagatgaaggaagtcggccggcagcgtgacccatggggggtggtaatccgtcgggatcagccgccatcatggcccatcggatacgagttacaccaatagatacatcacaaaaccgctctaggcctcgtcagcaaaatatgtcagaattcgacgataaaagccggaagcacggcaatttgccgccgcaccaacaaacaagcaagcacgttgagggccctcatccatgcagcggcggtgtgttgcagaaggctgcttcttttctggaagtgaggccggccaaaatcagtagtcgaggtcccgtcactcaccaccaaccagcttccggctcagcgcttgccagtcccagtctcgccaggccctacaaaagttccatcgagttcaataaaacattggacgacacgacattcttggcgcgatcgctattcttgttcttgggacatgtggctttcataccaagagaaagttggtgtatgaactcggttatttcgggcttggaggtgaagaagtttgaacccttcaacagccaacaaagccaggaggaattgaggattctacaccctcattagcatcctatctgcaagccgagagtcttatctgtttgcgtacacttttagagataatacccaaaagaaacatccccgcatgctcctcatgtggacaatccgagacccttctttccgagacctccgcttgccgcctgaaacagtgtgcaacagcagcggcaactgacactggaatatcattgagctggcggcaatggacgtcgagtgcagaggtgcagaccgaaatcgaccgattactccttgatctcgcgtttgtgaaagacacctgcaaaagaaccagatcagcaacttgagcaaaagctggatccttgatgagcatcaaacaggaatcaaaggtccaagcacccaacattcggatttcccttcctgacaaacccccaaaccttctcccaccaacaatcctccacactatcgaatccttcgtgacaacttcccaatctcactcggacgaaatttccctggcaagaaaaaaaagcacacctaccattgatctcaggcatccaagaagccctctccttgcaaaagaactccccctttggcgggatattttctggctcatcaagagacccccacatgacgtaccgaaacttgtcggctgcttctttctgccatttctcgattagtccattgtgtacgtaaagccatccttcagtatcatatctcccgcaaaacatcgagatccaaaaaaccatctctgaagtcctgacagtcatgttggctgtcccatcactcccccaaatacgggatgcaatcaagagggcgagaaggtacttacaccatactcgcaaataaaaaccccacactccccgcaaaactccctcgtcaccccgttctgctgcgtgtacttcttgagcgtctctgtcccgtcattgtacgagaaagcatccaaggcaaccttggctgtgagtccgtaatttgtcccaaaggctcgcttgcaggacttgcagtgacagagtgttgtccgagcatcttccaccgagttgagggtgagggtgtactggacggttttgcaggtgcagcctcctttgagttgggtcttggagtgagaggaggacattgtacgtgcttgaaggtagaagtcgatggggtggtgagtggtgatcttggtggtggtggtggtggtggtggtggtggtggtggtcggtaagagtagtaagcgtggggtgtaagtggtggtggttgtggtagtggtgactagtgtggacttgattcgaaggggggagaggatgcaggtgcgcattgatgagttgccaattcctgggaaagaaaagaaatggatgattgttgatggctggagagatcaaagtcgcgtggcttgtgggatagggggcctgtggtgggtggtgtccttttgtgacgtcaatgatttcgctgcttggttgaagtgagtactttcgacatctcacttctctcacagtctcactcatcatccctcctacctctcatgtcgaagaccctcttcctaattggcacctggctcttcaaattctggtttctcttgcattttgcatgccattcatcgcatacatccctctacagatcaactctgtcttggagtcgcccatccatctccttcttgaatggtagccacgacgctactcacatccaatcagaagcccgattagctcagctggttagagcgtcgtactaatattactctctttgagtcatatcaagtcatgcgaaggtcaacagttcaatcctgttattgggcacattcttttgccatttttattttattttttactttctatcgagtcattaattatttttcataattctgataatgaacgctaatgctatggttttgttaccccatccctcattttatccttcccttactcaacaagcttggtacccctgatcacaacaccagccttgacaatctggccgttaccaacatcaaactccttgagcaaagccaagttctccgacgcaaggacctcctcaagaggcacctcaacagcgccaatctcgttcttgccatccatcagggcaattcttacaggagcagcaccttcgatgctgccagagagaggaatgcggaaagtgttgtcaaagtgagggttctggatatcctcagcgccgcccggaacatcacacttgacgacggtctggaacttgtgcgcgccccaggtgatggcgacgctgggcttgagctgctcgcgagcacccttgaggttcttgacagcagcaacaaggacggcgagcaagcccttgatctctgcggggttctcctcgccgatgatgctggtggcatcggggatgaattggtagtatttgccgctgacagtaagcttgcccgcggtctcctcgcccttgtgcatgagggtaagatcctgcttctgaccatgagccaggaggaggttcttgacggtgatggtggcgaggccaatgtcatcgtcggaagcggtgtctgagtccttgacatccaacgccagcaactgatcatgatcagagacgataaagtctctggtctcgttccactcggggtggtggttgtccttgaccgtggctgtcttccagccgggagtctcgcctgagagggaggtggtgacgtagcagtctgggacatcgtggacgagcttcttgaaaatgttcttggacttgagctcctcgccaaagttgcttcctgactcgatggtgagacggacgacaccgactgggagctggtaggtcttgaagtaatcgttgaatgggtcgagcttcacgaggaagcggttaggaaggacggccatgccggcaatgatggactggacgaccttgcggacgcatgagtcgatgaagccaagattggcaatgttggcgccatctgtgtagttaaacttgaggtaaggggggttgatgaaggagacttgggcggcgccaatctgcgagtctgttagtaaggcatgcctagacttgctccaaagaacctcggtcaacttacaagagggatcacattggtgattgggcagagcaggatagatagtctgccactcagcttgacgtgctcgacgcccaccttagggatcatctttccgtccatctcgatatcgcagttgccatcccagttgacatccaagtccagcttgataccaccgttgtcaaccttatgcacatccacgttggagaaggtcatgggctgaacgcccaagtcaatcttggcgaagtgaagtgtgttcaggggagcaggaagcatctgcgcgaacatgggctcagcaatctgcttgatcatggcgccaccggcaacacagatattgggccataggtgaccaacgaggtcgttcaggaaacctgtatgtttgtcagttgaatcccgagtcttgtttgtggttggaacatgacatacccgctgactcgggaccgccagaggcagtgagagtctctactagggacgccatggtgtgtgatgtgtgtgagactaggggaccgtaactagggaataggccgcaactagcagagtcaactgtgaagaagttaaaatatggcagaaagacagcaacgagttgggcaaacgtatcatatatacccaaaccgggtctggctgtgcacagcaacgcgaagagggagcaggaggaggggctgcggggtcctggggcccgctgccttggcatccgatcagttgtggactttcgatagcaatcgcttggcggtggggtgatacgagtgacgtcaaactcttgccatgcatacggtgacgagtggttttttctgtttggactgatttcaacaaatcattgaggctaaaacaagcacaagggccaagatccggtcatcttggctcatggtttcaggtaggaatgttgggcttggaagcacgctgacgttgcagctggggaagtcgggcagtgcaggagcaaaagagctgacgggtggagtatgccgaattcggaaaagtgagggtattcccagctgagtcaggagtggggatgttcgttgtttgcggaggccgccgccaggccacccccggtggacggctcaacaaaaaaaggagagactcgtttgctacgagttactgatttttgctgatctcataaacaaacaatcaagaagctttccattcggctcttgaggagcggccttcaaacgacccggagatcgtgacgatagcagcgtctaatcacggtgtgctgcgaacaatcgtccctatcgataaggcccaagcatatgcgcccaacggtcgatcgattggcggtttagcaggggttattgaggggaaatgcgacctgaattcaggggttcaggggcgagtgagaggtaggtaataaacaacaccaagcatacaacagactatggaagtttcgtggataatcacagatcaaaagttcaagattttgggacaagttcaataatttgttaaaaaaatacgattaagatcattgatcagattcaggctcacattctatttttagaggccaggtcttcattatctccaggagtggtatttttggcaactaaaacctaccttgccagtgtctactgtagaccgaagaaaccaacaggaggaggttgcgggacacggccacgccatgagtgcccctccctgacgagctgctgacgaagctggtcgaggagataattctgctcattattgcgagggggcgcaacccagggtgcaaaatatgtaccattagcattaggtgggaaggccgctcgctgctcaaaatcggtcagctcgagagcaccgccagcggaatgaagcaagatattcctgacctgaaagtcatcatagccctcctgccgaagctcagtgatatgccgggcaatgtagttcattctgtcgacccgacagttgtggcagaagttggggatagacccctcatcgtctttggtaggggggatgttgatgggggagtaggtttccactgggaggtcccaggcataggcagggtgtgtgcagccgttggaagcaacctggctcgtagtatacaccaatttgtgtcggcaggtggggcaagtgacggccttaccggcttctatcagatgtttttcccagcgcccgtagcaagccttgcacatcatgtgcccgcagaaaagagttactcccgggtgggcattggcaatgttttgcggaggagtggcaggggtgaggatctcgtccttgtcgaggcagatgacacagtgcacaacaggcgttgtggtggcaccggggtagtttccgagacggttttcctgaatccaagccttgagtgtaggccagtactgaagctctgctctttgagaagccattttgatggtaaatcgggttctggaaaaagaggttagttgggtagtagtttgagttgagacgttacctagcggaagaataagttaaggtagctgttgcggtgaagtgaactgaatggttcgatgaagatgaatgatgatggcagagacgagcggtcgtgctttaataggcttctttgctgttatctctgattcatttacaatatagttgaagtgagttaaatcatgctgtccaactgatagctacctatgtttattcgaatattcgccttgtcttctaagtatatgcagccagaacaattccattgtgctaccagacagagtcgcctttgttctcgcaccggaatttactggcggcagttaccacatccgttgggacctgcatgtggtccacctagatactatctcggaatattgcttcagcgaatacctgccaacctggtgcttaatgaatgtgcggcatgcatcaggaagatggccgaagaagattaatatcaaacggttggtgcgaacgattgttcaaacctcacacagaaaactatctagtatagttttgatggtattcctgttcacattttctgcagcattacaggtactttggaattctttgtctgaacacccttcacaacaaagggtcatagccaaagttgtctttctttcatacttggagggtgacaacaaagaaatatcagccaaggcgggtagatagagcaggatttgtatcccacatgggtaggaagatacgacaatggagagctggtagcgagttatcacctacaaccagccctgggcgatcggtggcaggtgtgatcccgaaacagttacgccagatggccaccattagtatcgagtgtcaaacacttccaagacccttatcaatcttaggtggctgtcaccatcagcagccttttttgtttggtgcagagacaactttcatagcaaaatcacctatggcggtggaaataagcccatgggtgtttccagctgagaggccatatcgacaagctgaaaggaactggcaaatgcattttcgtaaatgactgggcgatcgtcttgttacagctcggcgtggagaaagatggtatggtcttgatgaactaccgtatgctgccgggactttgtgcatccgcacgttttgtgcaattggagatgtatgaggagtggggggtgcgccacctgcctgtaataacagttgcaccttccaggttcacctcatatcgaagcttgaaagtggaaggcacaactccagattccgcgatgagaaagtgcattgcagatgttcggcggaaggagccgccggcatggacgctctttgcaacttcccaaccgaaactcgactgacagatttgagcgagtgaaaaggaagggacgacaacgaatagtcccaatgcgggctttatacttgccatcactgctcatctgaatcagtatcttctcgataaccacccgacacagataagggaaactgttgttcactggttcctgtcgaaagtgagaagcaaccgagcaaccaagaggccagcacgattcatatacccgcctgggcatagctccacaggcttcctggaaggatgcgagcagaccggggtttgagaataatcgggaaatccgcgccgatagacgagctgcaggctgaacaggggtcggggagttgccaagagggccacaaggtggcatactacagccaagctgggggtacatgaggcacatcgatgcagtggttgcagcataactgtggtgttgatgttgccggtagaagtctcccaagcacttcccatcgcgctgtcaacatccccaactttgaacaccaaactagatgaaacttgttccccgcccgccatcgaagattctgacccgttgcgctacgagcttggcaatgcctggctaggtcatagtgtatgcaggggtcaaggcgtctagtcctaaccgaagcatcaccgcgcaagaattcgaggaggagacaaatacatacagctggactgcaagcccgttcggggatttctttctctgtctctcgactttcaactttgcacctttcaacagtccagaatcgccatcttgacaacctccaccatcatgcgagcccccgattccaccaccaccttgtggttcatactcctgtcaacctttgctgttgcccaggacaccaccgccaccccaagactgacaggcctgccaactttggcaccgagcgaccgttgcgcggcgtactttcaaaacgaattacaagcctcgtatcccacccaaccagccgccatcgccgagatcgtcagttccaactcgcttgaccatgaccacgtcttcgtgacaggcgatcccaaactccaaccaacaaacgctcactctgacaggagagtcgtctgctcgggcgtcgtcgccttcccgaccaagatagccggtgccattccacaaaggtccacgagtatactgcaagagtttgccatctggcaaaaggatgtgagctcgtgggtcgatgcaaacaaggagtcggtcaaggcctttgccacgagctgctccggcgagggagagacgggtgttgctgggaacgcgcttatgatggtggctaccgatgttgacgcatgcctcacggctgctgcagttggtcttgggccgactgatgggtcgaatggcgtgggtggtccggcagcaacgacgagtacagcgggtggacctagagagactggagctgctgccgtcggtgctttgatggggataggagttggattgatgggtatgctttgagggttcagcatcgcagccagtctggatcaggacaggtgcatgtggagcaggagcacattgcctccttgttgctgggggtcacgggcaagtagctgacacttctctgttctctccatgtgtgttagattcaactacccattcatcctgccccaacagcatctcctagcaggcacgatgaccctgccctcgaatcctcgcccgttcgctgaagttccatatctcaaagtcacgttggccgttccacctagtgtgatgcttcctacttcaccatcgatgttctccagggtctgttgcacagtgatatctgtcggaaaagttctgtcagctttatatgcccacgattttatacccttgccgtcccctttactacatttccacatttccacattcccacattcccatatatacttttctcccgaatacctaaccctttcccgcccttcttttctcttcaccgttacccatctcaccaacacacacccttcccccaatctcccatccacctggtcatcaaagcagaaatcaactcacccgtcctaccctcatccccccactgataaccaaatcccccctcagtacactccatcgtctcccctctcgtctcagggttataaacccaatgacacttgacctcccccctccccaccccctcctcgtcccccctcccaaaaaacacagacgtcgtgtcctgataccgccacccagtggccgacgctcctcccacaatcgtcaagttccagtagccatactccttttctatcaccgcaccaactcctgtcctaacaataaaaatgaaagcaaggccaaaaagggagaacatcgaggttgtcagtgcgtttgtggactttgcgacgacaaattcaggggtagtggataccaagggctagtggagacaaatcgttggagagaataaagacaacgttagtacgtaaagagatggtacaggataatatacccaaggtcaaatcaagctttcccgagtcctgcaacgttgcaatcggtagggtcaataagaggtagtatgccagattatgtagggtgttcagccggtatgcaagtaactacatccgaacgtgtaactgcaaccaaggagacagagtgaaaccaacagaaccacaattcagccgctgcagctctcgcctcagccctggatatcaggcggctgcaggcggccaagcatcactcatttgtccaataagcagtcttgaccttgcaattagtttaggtatcattagtcacagactaacgacgtgaaccaactctcgcctccctccctactttgctccgtcgacggccgccctctcgcctcagcaatcatccccacgaacaaggacattccaattgtccttgaagaacgcctggcccttgaccctttgataggtcgatctaccagtgatgcatccaccatgcaacacagaattcgcgccatcgccaatttgcttccacgtgagctccttctcttccaagttctgtatatctcatcgtcagtcgactttccttcactcaaccccccacccaaagccaaggcgaactcacatcgttgcaccaatagatagccgacttccacgaacagctaactcgtccacaattccccggccccggcccgttcttgggtgggtcagtgttcaaacgcctcaagtaacaaatcccgtcccagattttgctcgttctcgcgccgtcgtagtccaccttgcagttgatggactcgggctgttcatcagcggtgccggcggagacgaagctcgtgtcatcaccggtgggcatgggatcggtagggattccggcttggaaggtctcgttccagccggggtaggcggcttccatttgggcaatggcctcctcgatcgtgccggtcacggtgacgatctcgctggtggggtcgtcaagcttgacggggaggtcccaggaaacgtcgactatgttgtagccggcaattccgttcggggcttcgtcggtggagggggagggagcgctggagacaccctgtttcattggtaagctgttggtgcttcttcttctcggtctttgacgtgagtaggaggccataccttcagaaaggtggccagggcggtggcagcgaagatggtactggaccacatgatgatgtcgcttgcagagtcttggcgataagatcttggtgcttgaagcctcttggcgatggagaaagagttcgggaggaggctacgagggccaggatatgtattaataagtcacgaagaggttgagagcagctgatggaaatgtgggaagcggccgtaaattcccactcaagtcatgagatcagcgtgcgcaaacggagtctgttgctcttgccccttcagacgattgacaacaggagcctcttcccatatatgctgagcacatatcccacctgtttcgactggcttatagccacggttgaaccgcccgcacaaagacggatttgttgctttgagaacacattcttgttgctcccactaacaaccgaactgtaataaaaaacgttaaaatgcgatacatgaaggacttgttgctctcaagctcaggttcaacagacgaaacagcagccgtggcgggacttgacgcagaccactagccgacttttacaccacttcaacaggagccgcgtctccaacatgtttccgccgacgcaaatccaagcctccctttgtccaaaagtttccccacccgttcggtgccgcaggtggtttctctttaggtccgacttttggtttgagtgtcggcgtggcaggacctggggggtggacgccaggcggtttgatgcctattttgttacaggcactccagaaccacggcttgtctttgataccggcggggactcgtcgaaggacccaagggtataatcttcttgcggtcgacaaagaagacgacggcaacggatatcatgtatgttagacatgctactacaaccatggatccgacatgaggccacttgaggtgggacaggtcttcatcctggatgagggacatgctgtaaacagcctgcttgtggatgaagatgggtcagcgtgaggcgttggagtccatggttcagcgctgagtcagggtacgtacagtcacatagctgagtggaaggtagagtatagtgacaacagtgaaaacaatgatatggcgattcatcgatgttgacttggaggcttccagcatatttgtggcgctcaagatctagtaagactgtccgcaaaagctttcagtgaacacgcatagacataccccatcttgaagcccacacatctcgtctgccttgacctcgatgcgtctctcgagcttagcttggaggctgtcaaattgtgccatgaccctgtcccagttctcttcaactatcctgtcaaatttggctgtctcggaagtggattcatgccaaccccgtagaggatgaatgccaaaaattctataaaagtcttgcaggccctcttgagtctctttcatccattcaagagcaattcgtaggagatagagaagctgaaagcacattcgtgattgactgaaggagtcgtcgagcatgatcttctgggccttgcgttcattgaagatgtcctctgcctatagagagttcatgtagtcagtgacaagacatatggtgaagaggagatacccctacctgaacggtgacagaactgtcaattgcatccgacagacggtcccaccctccataccaccttgtctccaagacgttgtccaacacaatttgtaaatgacaaatgctagctctttgagcaatcatctcaatcctttttgatcgcagccttacaccttgatattcgcgccgcgaagtgaagacgtggtcttcaataacaacaatgcagaacaaagaagccgcctcaacgttcacacccatttcacagcagctcgcgcttcctcaacacccccagttgagtgtgggagcttgcggggcagcttcccacgctcccgttcaaggaggaagcccgggggccagagcccgttttccggatgaaccggagatgcctggagccaccatttatgaaatgaggttccacacgaatggctggaggtgtcaagacggtgcgaggaggtaaaaggatgccatggccactgccgaagaaacctggcgacaaatgaataatcccgatacatatcgcgcttatcttcctcggacgatgcgttagagaaatgttgtcgcgatagcaaagagaaaatgaatgcagctgcattgaggttgagagttggacgtcttgaggtggtaacaaacctgtcacgattgctcttcattaatcatcacggcagtctcgattttcaaggctagaacaaaatgcaacataccagatctgaccaatattgatatcagtcggctctgcaaactcggggtggagtacggttggtcggaacctaatatttgggggcaggaggaccatgttggaaaccccatgttgcctacagaccacctggccggttgaagagaaagcttgtcgccacacggccaaagatacaggaagtacgcctcattgagctcaaaatgtgttaccacgtagcgaagatcaaggccagggtgaacaagacgccagaacatggtttgttccggcaatgattctcgtcaccgtcctggctcttgcctccaggctgccggcatcacacttgttgggcactcttcgtgtaagaatttcctgaccatgccccccatcgaagggtcgagatttcggccgaagctcattctttgctgcgaagctgttgtgctgcccttggcaggcagaacgaatgaagcatcgtcaaacgcccaatgcatgcctgaaagaggagcgaaaggcgaaccaaatactagggggccgcttgttgcgcacgggataaaaggtgggtggtttggtgggaaaagctgtagatagtcctcgagggtggcacttcccaggtcagacctaatagcggcgaaatgttcctcactttgtttactgatgagaattgccgtccactctcgcaaagaaactatgagctgagatagttgggtactactcggcacatgtatatcaagcaagtgcgactcggtagccggagtgttgatggtattggttccggtggatgtcggggaaaactcgccacgcttgatagctgttggtttccaagtatctcattgagtcgccgaagctcagccagaagctgctgtgcgagtgtttcctggtctatgatggcctctgccatggagttggtcgacttcgaagatgttgggactggttcggtggtatcgtttgccatggtgagaatcgaaggagcccagggttgatgagaactatccggtgagaagagacggaaatggctggcctcagagattgggaggggagcagaactccctgctttttatggtaccatgacaccagcaagcgcccggcattgcaagcagacttcaggttttaggtatgacattgtccttccctacctaggttgcatactgccgaagatagagtctcaaagggtcgggccggtcatactggttttccgtgtctggctgagttgtggttggctgtcctgataaccaatccaaccctccctcaacaaatgcagaattatgtgcatcctatacagtgtagagacatgcgaatagcttcaagatgttgaatagcctcgcattgctgcaatattcatcagcctaaatctcacaagcagccatcccacttcacccatatccatacaatgacgagatggtcagccaagcagaaactagttgccctgtcgtcgaatatttccactagtgtgatgttggactgtgatcctttgtccccacacggtggacgatgctacctattggcgagcaaggtggcaagcgacactcgtgttggttgtggaattggagtgcagagctaagagctgcgaggtcctcggccgaaatgagggtaccaaaagagcacaagtcgtgctgccacgagagaggcatgtggcgcagcggcacagcggcccggggagtaatggctgttggaagaaggcgaacccggcagtttggacattccaaatgatcaatctacacataaagtacggcggcgtacacgaccagccagcttctccgagatgaatgccaggaacaatgcaggagagaaaaggtgggcgagccggagcgtgggaatctaccccgcacagactgttctatcctccttcctccttcccccaacggttgccgattcgccaaccacaacactccgatcccgatacaccctgcctgcttgcctgcctgcgatgcgacaacccctggttggggctcgaatgccgtgccagccaagcgagggtgccatgcagcccacgcagccaacgcaccgttaattccacgcttcaattccgagaatcttcacacaccaattttctgggtcaaaaagagcagcaaagacagaacaccgtcggacttgtcaaggaaaccccccagacccacccggatcacatcgagaaacgctcggcaccatcgcctgttgcgccagagtttccgggcggtggagccgatgggctgacacaaccgccggcttgccatccggacaaggcgcttcgacgagttcggcgatggaggccaaaataggtcggcgctaggagccctgcccgggatgggcttgcgagaaggtaacagccccggtgccccggaaatgccaagttaccttgcttgctgcggtaatatccccaatatgcatcgcattatagccacgacctgccgtcgcattcacacaagatggccccttggcaaaatgcacgagaagttataaaacattctagcggccctcgtttctccctccacgcggctcgtttcccgagcgaacaagtctctggttccagcttccgtatccccagatcaccaccaccaccaccatgaagggcggcatcgttggcgtgctttgcggcgcgctcctccttgccgttgaggctgcatgcgcccccaactcggacgccatcacaaaggtacctggcttcaagccaaacaagtgggtggccagaacctgggagggaaacaactacgcctgcaaatgtcatcctggcgactactgctggcccaagcaaaaccactgggataacctcaaccgcaccgttggcggcaaccttcgcgtcaacctgcccccaggagctccttgctacaacaccttccaaggccctctcggaaccgtcaacacgtacgatgccgccaagtgtgctgccgtgaccgccgggttccccaatgaacagttccagtaagtcatctctgcacaccaagcatgaggagaacatgttgactgaccatctgtgacagaatcgagctgcccaccgctggcctctggacctacttcaccaatgacacctgccgccctaccgctgatcccacaggcagctgcacgctgggctactatcctgtcctgtacatcacagccaagaccgttgcccacatccaagcgggtatcaacttcgccagaaacaacaacttgcgcctcgtcattcgcaacactggacacgacttccttggacgcagcgttggctggggctcgcttgttatcaacactcacagcttcaagagcatcagcaccaccaacaactggaatggccctggctacaacggccccgccatcactgtgggagcgggtgtgcaagcctttgaggctcttgcccgcctgaactcgctttcccctcctcgaattatggtgacgggcgagtgcgctgtaaggactaccaattcttagcgtttgatgttcatggactaaccggtatcattagactgttggtgtcgccggaggccttgtgcagggcggtggccatggccccttgaccaacttctacggattccttgccgacacggctgttcagttcaaggtcatcacggccgatggcaagatccaaactgccaatgccaacaccaactcggacctgttctgggccctcaagggaggtggtcccgccgcctttgctgtcatcaccgaggctacctacaagacctttgccgacaccccaagcgccggcatcaacctcgatatcaaccccggcaccaactccgatcctgctctttactgggaggccgtccgcaagttccacagctacagcacccattttgttgacaacggcctttatgtttactacgaaatcggccccgtccccaacactctccacgtgcatcctattgtgggcgtcaacaagaccctcgcccagctgcaggctgttgtccagcccctctttgatgaccttgatgccctcggtgttgggtataccacctccagcgagacttacggcaccttttacgacttgtacaacgccatgtttgagattgaaatggctggcaactctgccctcaccggtggttggaccattggtcgccaggatgttatcaacaaccacaccgccatcattgacgctttccagaccgttatgaacgctggctctttcatcgtcggccacatgtggtctgctggccatggcctccctcagagcgagtgggccaagtccgccatcaacccccgcttccgcaacgttgttgacaagcttattaccatcgttcctgtctctggcgatgcccctctcgccgccaaggccgaggcccagaaccgcttgaccaacattgtcgacggctctctccgtgccgctgcccccaacggcgcttcctacatcaacgaggtatgtattgattttcggtctccaaccaagcaggcatatgctaacatgctcaccacacaggccgatcccttccagcccgactggcagaacgctttctggggtaccaactaccagcgcctgctccagatcagacgcaagtacgaccccgagggagtcttctatgccgtctccactcctggcaccgagaagtgggagcagattgagacgggcactaggttgtgtgtcaaattgtagtcttttttcttttctgtctgagcgagtcttttgatataaaataataatagaatggtatatacgttttcaccaaaagaatagggaagcttgctgctgtgtgattcttctaggtcatgttgtacgtggaggccccttttgtggagtccaggagggtattgtttccagagcaacggctccttgagactatttgtgaaatgcctgatgcatatcggtatgcataatccttgggtcatgggcccccagagcaagtcaatgggcctatcagctatctttaaggtgctctttactactttgaacactcattcaatacattctgagggctaaggagaatctttccagcgcctgatgccatcgttcaacgctagatagtcattaccgttcaaattcgtggtcttgggtagatacgttgcagtgttcagtacctattccgtctgcaactgaacatatccatttaccaacaggcatctgttggtcctttccctgtaatgacccggtgcctttccaatgcatgtattctttgctcttgtgtccatgttcagactttttgctttggcgaatgaggttgtgtccctgatttttgcgatcggcaggtgtaggtgtgtgtgtgtgtgtgtgtgtgtgtgtgtgtgtgtgtgtgtgtgtgagagtgtgtcagcatcgaaactcaccaacggaggtttaagcatgggctgtggttcaggacgcagagaacgtgattgtggcacagcaacaaagggagctaggtcttcagaacggcagatgccgcgcgctgcaaggatcatccagaagcctgtctttgccgtgggcaggcaccaacgtgctgaatatgcctcttttccgcagagaatatcactatggacctgcctgtagcgtggcgtgatgctgttgtgttgggtttgctgctctaggtccgatacttgtgatgtgttctgctgttacagactgggaattggaaaacatgaaacttgggatgagccctatatctgagcgtggtcgcgtactccaaaagttaattacatcttcaagacagttttggtggccgaactgcctgagatgaaatgtactctttttgacgctagaatcatctccacagcaagatcatttcccatctctgccagcttggcgaaacctagcaaacttccatttttcggcccccggaacggcccatcaacacccataccacccccctcccgtctgacttggcatccaaggtcaagtttcggctgaagtggcacagcaccacccaaatccaacccgctttcccaaatctcacccccttaagcgaaccactcttcaacaaaaaggtaaagattctctctccaagctgtgccacacacccaaacccacaaactgggctgagcatcttatccccttatcccccctatggcgcgccacgtccgggtataccgcccatgccgcactcctacacccccaggcaactcatgagatttatccaatcatcatgtgccaaaaaatacaaaagggggttagccaggtttatgggcgtatagcaaaggccccaccacacctacctgagcattagtaaccacgccgcattggaacactgcataaacacatcagttttcccaagctggaagacttgacgctgttggttgttgctgaccatccggtatgcgtcgagatggcgaagcaatccttcacaagtccaaaacccctttggcgcccacattttcatggtgttccagttctgggggagaaaaagacttagaatccaaagaaagaacggggttttttgccttttctttctttctggatagcgacaactgagattccgagcgatatatttggaactggacgatgaaaaggacgacattctagcaagtcgacgtttacactacccttccaagacattgacgataacgatttctcttgtcgtgccactcagctcttgctgagcgacgcccgccaagatggtctccctcaccacagagcagtcattggcggtgctcgcaacgctaccgaaatgcgctgtatgatgatacatcaacatccaatccttcactggtctcttgctaataaccttgctcaagatggattgcatgatgggagcacccagcaccggccagggctcgacagatgttgatctttgcgcacctcaacctctagagaccaccaactgggtgacgggttgcatgaaaagcaactgctcaactccagaagcactctttactcagaatgcgaccttgcgagcctgcggtattgaacctaggatggagaggcagtggctgcctgtgatgacgacgtttatgatccttgccttcatttccgtcgtgctgcgggtggccaaccggctttacacgaccaagacgtattggtgggacgatatctttttgtcgttgtcgatggtatgttatggagaggctgtcaagaggaatgaggtaactgactgtgctgaaggctggctcctttgcctacgcttcgatccattacgaggcgataggtcacggtttcggacgagagttttggtctctgtcgccagaggagatcaactacattattgctgtgagtattcttgccaaacatcgccgtcgacgacttccacttaccagggataacagggtgtatacgcgagcatgctcgtcttccatgcagctcgcatgctgctgcgccactcgcaaatcctcttcttccttcgcatcttcgtggtgggcaactcgaggccaatgatcaaaggaaccatgatagcaaatgctgtcatctccaccgccatcggtctcatcatggcgctccagtgcatgcccgtcggtttcttctggatgcgatgggactcgacgcaggagggcaagtgcctgaacaacctccagaccctatggatcacctccgtcttcaccatgttactggacgcctggacactcatcctgccactgccctacgtggccaaactgcagttgtcggtgaggaagcgaatcggcatctcggtcatgctcgccaccggtctgagcatcctcatcttcagcatcctcaagttctggtctggtgccatcacagtggaggagcccaacccaatgtatacctttgcccaggtgtcgatgtgggcgtcgttggagatcaacgtggggatcatctgtgcttgcttaccgggtataagactactattcagcaacttgttcaggcagacgggttggtttatgacgagcagtattgggaggacggagcatatttcgctgtctgggtctcccgaccggagtgggaagaagtcgtgcccggagtcgcagattcgcatcacgacaactattcagaccaaggccacgcatgcgttgactgattccgagtcgcatctgcctctccatgcggcgagcttgggggcggcgattcatcctgcgaggcaagagctgggtgtggtggccaatgcttgggcttgagtggacgtcggagagggactgtatagatagaattggagatacccatagtgtcattgaagcgatgtttccgtaaaatcgccgtgactaaaagggcgatgtcattggcatggtgtgagcctgtcatcatctttcgtcacaaatcaggttcgctgcagaatgaaggcacgccagtggtagctgcaccggcaaccgtcaccattgaaccactgttccttccatgtgaaaaagagaaaatgggaccgactggcatgccgactgttcccctgcagttggactaatgcgaccgtttgactgataaccgtccaccctgcgccgctacgcccatcgatcaaagcttgcgcctttgcctgggctgttgtgttgttacgtcttcggtcgggaacacggcgctcagactgacctgagagtgatgtttggaatagcaagatcattcataccaaccaccctgcccaaaggatagttacagtggctttcttgacctttcgacgtaggcgacgactagctgcagcgctactacaccactcaacgatgcatggaagcgatctagagaaccgaccggaaaccaatgaaagaataccacgatggagccttggtgtgctcaacccaaaggacacagtcgacgttccaggtttgatatcctccctgtcttctcagttgcatgctgacgccctcaaccgtccatctaggcaccgtcctccttctcgtcggcctctctccccaaccaaaacccgacactcactcgatgaccttaatctcccctcccctcccgaagaacccaaccaaacctcctctcctccacgcgacgatgaccccccaaataccacctccactggcatcctcctagcccctcaacccctcccccatgacctcctcagctggcccccctggcgccgcaacctcgccctcctcacaataggtctctactccctcctcggcggtggaacaacccccctcctcgcagcaggcttcaccaacatctcccaaatcttctccctccccctccaccgcatctccctcactaccggcctcgtaatgctcggcatcggtatcggctgtctcctcgcctcccccacggcgatctctacgggaaacgtcccgtttacctagccggctccctcatttttctcctgacatgtgtctggtgcgtgttaagtccgacgtttgagagtttattgcttgcacggtttgtgcaaggggtggcaatcagtcctgtggaggcgctgccgagcgcgactatcacggagttgttctttttgcatgaacgagggggcggggggcggtaggataggggtttacgggctttgtttgttgggggggaagaatttggtgccggtgatgggggcgggggttgttcatgctttggggtggaggtggggtttttgggtgatgggggttggggtttgtggggttgggttgtgggagttggtgccggagacgttttgggatagggggttggagacgtttttggagagggagtcgacgggagagggcggacgggggagggaaggagggggatagaagatggaggggagtggtgaagagagctccagacgtgatggtttgggggagatgggtatatcaaagcaggaaggtagtagatggtctggggagacggttgagatgtttgagctggtcgagacgactaacgatcctgccactacctcaatatctgcagcttgttcatcgtcatccgagacgcctgggaaccaggatgtggaaaagagggcaacggaacatcaagcgacgcccccgagacgaaacgattacaccagtcgcatggcggcacgaccaaacgggtcgttcaggacacatctactgccgtggcacggcagattaccagaggatgaacgctggttacgtgtggcggctagaccgttcttcctgtttgcctacccggccatcctctggtcagcgattacccactcttgttgcatcggctggctggtggttatctccgagtcgatggacgttatctaccggaaccccaacagttatcacttggtgctttctcgactggcttggtgtatatttctgcatttattggtggcgtgctaggcacggcgataacaggcaagatgttgaatgtattgtgagagctatggctcgcaaaaacggaggggtgtttgagcccgagtttcgactggtgatgatgatgccggtgaccatcactacggtagttgggttggtgggttttgggtggagtgctgaggtgcaagatgcttggattgttccgacggtgttttttgggattatttcttctggatattcattgtgagtttggccttcatgaagatgcggagaaaatatttactgcgagataggggttcgacgaccgccatcactttctgtgtggatagttaccgagaatttgccggagaggcccttgtcgcattaaacttcagcaagaacattttccacggcttggtcttcagtctcttcattactggatggatccagactgacggctcgaagattgtgtacatttggattgggattattcagttgctggcgatgttctctacattatcgttgttttttttttgggaagagggcgcggtattgggcgtcaaaacaagcgttccatgaaaggattacgtctactgactagaaagggagaaaagatgtagaagatacaacaggtccaatcaaccttactcagtcttcatggcatcccggatcatggagcattcgacatacctcccttccaagtattccgctaccttttccacatggaagccgtacttctcaaacaacggtttccccgcaggcgaggcctcaagatacgcctcatggctaccctcatcaaccatcataaccccccactccatcaacaaccgaccaacgccagagcctttgtactcagggcgggtagcaatgagagccagataccagtgggctttgctgcccatgtacttctgatgccgggcatgctggtcactaaagaacgccataccaaggtcggggtcggtcatgtggtccattacttcccgagggaggtccatgtcggaggggaataaacccgggagtgtagagttctcaaggacaaagacccacttggctaggccgactactacaggaggggacagagagatgactttggcgatggcgaggtgggagttattgtctgagaaggtgaaggcgatgacttgggtccagaagttgattttgagttgttagtcggagatgtggttgagtatgacgttggtggagaaggcctgctcgaggaggatgccgcaaggggatacgtcgaagggagtggcggggcgaatttggggtccgtgtagaaagcgagcttttgcgatggtggtagatctggagatagaggtggtaagaagggaacatgttgtcatttatacacttctatacaccatattataccgtaccttctaataacacgatgactgttgttgcaatgcagccttggtgagagcactcaaacatgatggtttgcagtttgtgacagcatggaaggattcaaataaccaaaattgcatagctagacagcgagacatgatactacttctaggtgatcaaggagccattttgatcacggagagtgttgacacttacgcggcaatacttgacggcgaggggacggaaaccacaggagccgccgctgccctaggacgggtccgggctctggagctgaaagggataaaaatgaaagaaacaaaaagaggacaacggggttcagctggctggattatattgacaatgtcaaaagctttgccgaaatcctcaagactatcgtgacaggcactgagtggcgataatgtttgcagacgttgtcctgtgtgtggaccttggccaagacatgtcttggcaaaaatggattttcaaggcatcgagatttccaaaaaaaaaaaaaaaaaaaaaaaccccatgttgcatgtgtcagggaccggtggagacgccaaacggtccctggaccaaggcgctaacagaggttgcgccaagggaaaggcagaactgttagtgtcagccattacccctgtcgtttcgacgtcactggaccctgactcttatcgctaccaagagatccaccatcagtgctccaaagccaattagacgaaccaaacgcccgataagaaagttgaaagtttgggccgtcgcatttgagcgcagtctcttgcagcaccgtccttcactgcgcttgcacctgccattgtttgctgtgcttcccttctttcacacataccaaccaccacaaagccacctacccaacggtcgcttctcattgtgtgcttcccagcggcaaatgttctttcccacagctcgtgtctcacaaagcgcgctgcccactcttcttaacctcacgctccgccagaccgctcagcaaaatatactactctcttccttcgccacacatattggtcgtaccagagtctcgttctctacattctcccccttgcgcaccgcatccgcgaccgcaaccgccgagatggcttcgatccagattcccaccgtggctgccggcagcgagcgcgtccctttctcacagctcaagggtcgcattgcgccccagctcctccaaaatatcgagaagatgggccttacacacatgtccccagtgcaagaaaaggtcctgcagatgtccagcctcaagaacgactgcctcgtacaagccaagaccggaaccggcaagacaatcgctttcctgctccccgccctccaaaacatcatgaccgccccagacctgcagcgcgagttcgttgcaatcctcgtcctcgcccccacccgcgagctggcccagcagattgccgatgagtgtgacaagctcaccggaaagtctttcgagtgccacattgccgtaggcggcacctccaagaactcgctccttcggaggttcctcaatggcaaacccaccatcctcgtcgccacccccggccgcctcatcgactacctctccgaagaagaaaccagacacaaactcaccaagctccgctgcgtggtccttgacgaggcagaccgcatgctcgaccaggggtttgccccctccatcaagagaatcttgcaacaaatccccaagaagcaaactgctggctggcaaggcatgtgcttctctgctaccgtcccagacgagattcagcagttcctgcccttggtcctcaacaagaagcacgaccgcatttccaccatcgaccccaatgagacccctaccgtcgacagaatcccccaatccgccatccccatcccctccatcgccgacgcccttcccgtcttgcactcctacctcatgacacaaaagaaaaccaaccccgagctcaaagccgtcatcttctgcggcaccgcccgccacgccgctttgctctaccacatctttggtcccaccggcggcgccgcccccaaaggcctctcctgcttccagatgcactcccgtctttcccaaccagcacgtacacgaacaatcgaagagttcaagaacgccgaatcaggcctcatgtttgcatctgatgtcattggacgtggcatggacttccctgacattgacctagtcatccagatgggcttccctcccgaaaaagcacaatacgtccatcgtgttgggagaacgggaagagcaggcaagtcgggagaagcaaccatgattttgacgccccaggagatgaggtttgtgagagcgaataaggactttcccatcaaggttactgagccattgtatgtttctcccccccatctcccctgtccccttcttctttactaaatacttcttcaaagcaaccaccccgacctgccaaaatcggttaccaagattgaggaagctctcgccaaggtgccggagttgacgaaattccaagcttataccgccttcctcggcttcaacatcaccgtggcgagacagctgggcctccagccgccagagattgtcggtttggccaacgagtttgcctatgcgatggggtacgaggagatcccagaagtggaggccaagatggtgggcaagatggggctcaagggcgtgcccgggttgaggatcatgggcaaggggggggtgagcagagctgctccggtgccgagcggaaggacgggaggggggagggcccagggtggcccggggaggatgcagagaggcaaggtggctgatcccaggccgcaaggggtgagtggaggcaataatgggagcagggcggacggcaacaggagggggccgagagagagcacgggtgccaacgccgaggagccgagcaggaaacggcccaggcgtggtgcccaggcgtgaagcttgtctggtcacttgtagtctagacatcaagattagctgttgctgtactactcagacacagtgtcgcctcaattcttattcaaacaacaacagccacacgatggcacacgtcggtaaataagccaagttttgcacccatcatgcatgtcgtaagcttccttgtccatttctccacatgagtctgataggaatatgataaaagttatttgattcgggttccatctcatcatacactgccctgctcgccatcaactcgaatgtccgcttcgcgaaaaccgcaaatgtgcgcccagagaattcaaaggtcccgccttgttgtaaccgtaagccattgcattgcgttcatgaacaaaacaaaaagagaagggcgaatccgccccgtcctgtcggcatctggctctctcgactctcagctgaactcgcccaatcttggaccaaagtactcgctgtcggtcaaattcagcagagtacaagtcccttcggcgtcgcaaccggtattcaacacatcgtttccccaccagttcacctggaagccccacagctgcactgcgaagaaggttacgacaccgctaatagcaatgccgcaaccaaacgcagccgaagtcacataattgtactgttcacgcttcagtgtcagcgaccctgcaactttcaatataccttgggctcttggcaacatacctttgaccagaaggccaagtaacgcttcttcacaaacaaccacgaaaatgcacccaccgggacagcaggccacatgtaggccaagttgagcggcgcccagttcagggcaccgctcatcatgaccactgggtggacattgcggagtatgacgctcttgggccacttcttgttcaagtaccaaaacaacatgaccgcaaggaagccaaacgggaatcccagcaacgtcatcgaatactggccaccgacaccccaaatctttcgtggaccgaccgtgccccagaagacagctgccgtgaagaacgtgttgacacctgggcagaggaagcggaatggtgcatccggagtgcacacattctcgatgcgggtttggtattgcataatcgcgacgctgatcaaagtcgaaaccagcgtagggaccatctgggcacaaaaggtaaaccggggtggaatcttgacgtagtgggcaagcttcagatcactgctgaacgctatagcgtgggcgcaggtgacatatccgtacgacttgaaaaagcacatgccaatcgcgttgccctccatccacacaccaccgatgaattccgcgatgacgttcagcgtgacctccacaccagtcatgcccgcaatgataccaatagggacgacgaagactagacatagggcgatgccgtacaacaccacaaatggtgtcgtgttcgtcggccacaaggagacgccaaccataccgacggcgatggcaaaggccaagcacgtcatataccaccattgtgggacttcggggtaggcgcgcatgagccgattatggatatcaagaaggtccacatcctcttcggtcgactcttcgccgcgtgcatttttggacctcaaccttcgcatgctgaacttggctctctgccacaactcattcaggccgagctttatctccagacggtggtagagagcggcataagtcaccgtcgcagcgtacaaggcgaaaaagaacgtgtacacgaccacgttgcttgcagccaggtaaggaggcgagtatgcttcatacttcttggcgtcaaagagtccattgtcatccacgatagatctgactttgtaaatgtggccgaagtggtcgaaaggcctgtttgagttgatggggaggtaggccgtgtagtaggtgttggtgtagtaaaggccaatgatgacgaacatggacaggaatgccccgaagaagtaattgaaggtagagaagaagggcaccatcaaaggatcaagcgcaaagacgttccagtccaagcttggcagcgggttcagcccgaggcctgtctggccacccgtgatgctggccagatgaacattttgtggcgagatccaggtcatccagctgaagtaagtcagggcgccgcaaaggtagttgggaagccagaagtaggcaaacatggccccgcaaagccaacagaaatacttcattcgggacacggtccagcgagtcttgaacgggccctcgatggtcgtcttctccaactccttgtcgtggaacgcagagttgagcgcgatggtcaccaaagatgttggccagacgcagaaagcagggtagaccagaaaacggcggcagattccggccagcccgtacccgatgaagttggtcgagaggccaatgaggagctggtaggcgatgctgcgggcccattcctgtccgaagtattgggggagaacctgaatccaagcaatgtagttggtataaggaacgctcttggcgacgctggccatgatggtgataagcatgtgctccttcttgttgaaaggtcctggattcaggctgtgacgaacgccgaagagggtgattcccttgtcggggagcacgcgtgccaagaaggtgccaaaggggtaggccagcagctggacgacggttccgctgatactaacagccgggagacgaatgtcgaagaaggagttgatggaggagatgcagatagcaaacaagacacctatgccccaggcacggatggttgatacgggtagcgatgggtcatcatggttgtccacgactgctcgcacttcagtatagggtgaattgttggtcatgagagcggcctcaatcttcatctcttcaatgagatgctcatacttttggggattggcgaccaagtcggcctcgtgccctgtcccggggtcagtgactgagtggcaggccaggtagggtaaggaaagaggccgtcacgaaccaaggaactcgtcaatgtggttgatgatctcgatggggaaattggggtcgctggcgtgttgcttgtgcacctttttcatcatctgagagcacgcggtcagtacaagccacggcgtgaactggagagtgggcgtgcgacttgcgacttacagcgatagtcttgtccagcgtgaaggtggcagccaggtgcttagcctcaaggagatcggactcggtcacattaaactcgcgccccgtctccttcaggctcgcgggaagctgttcggaagagttggtgtcggagagcttgatcttttcgccctcaacagtggtagcgaacgtgacaggctccttggcctcggacatgtcgttggcggccgtcatggcaggcagatacccgacgctgagtagattggtggaccaggcaaagacgagaagatgaggctaggtaaagatgtctaggacggaggagtagtcgaaggagacgaggcacaaccgtcgtcggtacgagggccgggggtaggttgtgatggcgtgtagaggtgaggtgaaaaggtggaactgacgggaatgagtgaggtaaggagcttagaggggagagtggagagccagagagagggtgaggagagggttccgtaaccggagtcggccagagagacctcgtgagcgccggcggaaggaagcaaggacgcaacctaaaatgggaaggaaggaaggaaggaagggagcaggggaagaaggtacttgtggcaggagcaagggagagcaagagcaagttgtcgcctggaacctgaagaatgtcggagacagaagggacgaggggggcttataggggaatggaaactcactcatatggtcgcgtaatctctttctctatctcctctgcgtagagacgtagagatacgtatctctgccgtatctctgccatatttctgcggtatcacggtcggggcatggatggcgacaaactctaaattaaccggtcgtccgatattgctgccgccgttgcccatttctcctttctcttgcgagcgccggttgagatagtagatcctccgtgcccccttaactgtggccatccgtaatctccattctaaattctccagtgtccaagctaagcttcggtagcgccctgtcactccttgaacaagcctttcggctgtcaccgttccccgccatgtccacaggccacaggccaacagtccacagatcgccgccaatgcagttctaaccaattggcatagacgccgttgtcatgatgtgcgatgtgctccctgccttggcctgccttggcctgccttacggccgggaggggaatccttcccgcgccccaggtacgtgccgtcccctgttccagaccccaacccacacttctccgcttttcccgtcctccccctccatccccccatgcttcaaccttatctcgacctctgcctctgatgggagtctggactgtctccaggggaggtgggctaattcagagcttgattgcctggctcgcgaccggccatgcttgattggccagacaaagtgccgactgctccccccaaaaccccccaccaccttcacgcacttcttccgcacacgggggccgcggcatgaggtcatggcaaccgtctgcacccaaaaaacaccatgctgcttcgatgccattgtttagccacccctcgccgcgagcgagaatggccagatccgcatgcggcagctccagtggcatgccatccaggacaaagaacacaactgttctggaataggggatacggccacagacaaaggatacaacgccctttgtgttggacctcgagcaaagaaggccaacatggagaaaaggaagcaacaccacgacgaggtacaaggtggatggccagtcttgaccaatcgtccatcattcgttgctgcagcgccgatattgcgtctgcgtcgcgttcaaaatggcagcgaaggagcttccccggcatatcctcgacgatttcggggacccggtgccgggtgactcgaagaagtggcgggattatccgtatgcgaatttgcaattgcgcgaagcaacacaaggcgtctacaacaagcaaagcgatgacatcttcgccaacaatggcaacgaagacgccgacgtcatcaacgccatgtttgacgcatacaggaccgtttttgacccaaatctcgacgaaattccggcagcaaacagagacctctaccatgatgtggacgaactgtacaccgccgatattctaaagaagtgccacgacggtcttgttctgggacgaaggggagaatatctgcatggcgaacacttgtatgcattgacagtcaggctgttgcacttggcgcagagggatagaaacgcccgcctaggtccaggaacggggaagccgacaagccgcaaacccgcagcatggtatatttgccccaatgaggcgagtgtgatggttccgagcccagtggatcattcagaggctcaggctcaacaggccatagacgaggcgcagccctacttgagcaggctgatagacgcagatttgcgcttccaatatgagaatgtggtggagaggttcaaacaggccaaatttacagcccacttcgccaaccgaaacaaggctcattggatggccttcatcctccacaagccaaaagatgcgacgaagaactggaccgcatttttcttcgattcgtccccactacctttgaatttacaggagccaggacaaaaatatgccaaaaaagcgtttgtgaagtggctcgagatcaactgcccacaagacacacagcgggttaaaaacgtgtcatatgacggagagaagcccaaatctcctggccctgccctgatattcctcgacagggacatttcgacacaaagcgataactggagctgttccctccagtgtatcttgaatatcttggcttttatccgatatgggtgttggggttgggacatgataccgcatctgagaggcaaatcgaacagcgagatggtacagactatgatgaaaattctccacaacatcatggcactcaaagtcaacaagaacaacctagcggattacaacaccgagaacactaaaggcaagacgtatcgtcagacaccggtcctgttgaaccgagtagaccctgaagatgaagagtgtaagcagagggcagagaaggaaaaaaggaagaaggaagatgagcagaagaggagggagcaagcggagagagacaaagacgagcagaagaagaaggagtgggatgacatgatgcgtatatacgatgaggcgcagagtactttacggacggaaaccgacgagaggaaaagagcgccggctaaccaggtcgtagccgagtggccgaacaagttaaaagcgtggggagcaaagtggaacgagacgacggtaacaagtaatagcaatgaaaccgaggaagtcaagaggaaggaggccaaaaggaaggaagccgcaaggaaagaggccgagaagcaggaggccgagaagcaggcaactgagaagcaggcaactgagaagcaggcagccgagagggaggcggccgagaagcagaaggccgagaagcagaaggccgagaagcagaaggccgagaagcagaagaccgatagacaggcagccgagaatgcaaacagagagagctggacttcgggcaatccagacagttcagacgacaactcggacggtccaggcggtggaggcggtggacgaaatggtggaggtggccggagagatgcgcctaaacggaagcacagggaacacaagtaccagggacccaacaatactgactatctgaatctgggaggggacagaatcatcaagcaactgagagacgcccgtcagcctgtattggtcgtggacaaggatgtgcctgcaacggcgccgggctcagatggcatatacagactcttcgatcggcttctcgacctgcctgaggttgcgatgtttcccaccgaaatccatagcaagttacccccccatacctatccggggaacgaacggatgacaaaagacacattcaatgcctttcgacattacgagcaggcgctgagagatataaggaatggtcaggccatccaaaaggaagggattgtgccgctggctctgaggcagctggcttctctgcaggcccatgtgcgaaccggactccaaagttactctcgagggctttggttcgtgcttcccaccccgtatgtgctggtcgtccccgagcctgggaaggccgctccccctttggtacggttgggagagtccagagatcgaaatgacggattctattattcccgtgctgaacacgaggcgagattcaaaaaggcggaatcaacaattcattttgtttactgggaaaagaccaagcactgggccgtcatgtttcgacatcctgaacatggacatgccctctacgactctgatgttacatttcaaggcgaccggctctcgacgcggctggaggaagccgatgaggccatgaaagcgtggctcggtcataacgagattgcgttcggcaagagcctccggcctaaccttgtcaaaactcgaccttctgcttccgagagccactgggacagcggcctcttcgcgctcctcaacgtggtcagtcgggtacactaccggtgttatggctggcaggggctgcccttacaagtctacccggagcataccagtatcgccctccgccgccgtcaaatcagggccctccacaaccttgtcggtctccaaatgagcgaaggcattgataccaccagaaactacaagtcgccaactcaaccgaggtttgattttgttgcccacccccactatccgacccagcgctgggacggcagaaacgagagagataatgccattgcccttctacggccgcccactgcttcaaccaaaaagccagaccgaccacagtacaaagaccgtggtcagaatcccagacacctaaagcgcaaaaagaccacagacacagcggccacgcttgttcgggagattgggaaaggagagggccatggtccggatgggaatcagccgagtccggagacggcgaggtcgggggcggaagaggtggacgccgtggcgatgagccagtttgatggctcgaaggataatatgacgacactacccgagtctgaactggaaaacgcaaagctccgggccgaaaatatcaggcttctgcaaatgatcgcagctgacgaggaggagatcgctcgattggacgtgatcaacgacgcgttcaagaaagaggtcgttgtgctgcaagcagcgcttgagactgagaatataaacgtcctggatgcaggctggcggaccgatcgggaaaacgagatattgaagaagacgaggaaaaaggcggtagagtcggtcacgccctttgagctgtggagagatagggagtttggccgtcccgataaccgaaaagccaagaaaaagggcgaagagtacatcctgttgttcgagcaaggctttggtgatgtgctggacaagctcttggccttggacgatgataagttgaaggcgtccctgcgcaggttccgggccgaggtcaccaaggcagaacaaccgaatgctgctgatgaggatgtattcggagcccagccaacggccaaaccggaaagcaaaccgcaaaagacacctcctggctcatattatgccactgatagagcgacggcagcgactagcacagcgagtcgtccaacaacagcaataacctcccgcaccattcccgggtccaacatgaggccaggtctaccgacaattgcggagagttcttccagccctgccgatgaaagcccaacgacagcagcccaactaagagtgcaaggtcgacgatcgtcatcggctgggggtggcgcaaagcgtgccgaaatcttggactttgaagagtggctgctaaggggaggtgccgttctgagggcaggtgctcggctgaggggcggtcgtccactagggcaagttatggatgccgactacgaactcaactggcgagcccgccgattaaagtcgctccggacgttttatggcgaaatggaggcgaaagacacggaaaagggcgatgacgaaggcgctgcgtgggcgagaggtagaaaggaagattgcgcagatatggagatgtgctggatcggttggaagcacaaatccgatgccttgctcgaaggcgaaagacaagctagtctctttaggagtacgcccatcggcgtgggcgaaagaccggactggttcccggatgaggttgatgaggatcttgaccttgatctcttggacatggagaccaaaggtagcttgaagacctacgtctcggagtaccatgagaggttcaagggtttattccgggtctcgggtgataaggcacggcgcgggtcagtcaatgacaccgattcactgctaggcaagactgcggcgggtcgtcgactgggcagtaggaccgctcatcatgggggaggaccacatgccacagcgactgcttcactgggaggaggacgacagaccatagttactccttctcagggaggaagacaacaggctacaatgactcctcaagggccacaagtcggtggacgtgtaacgggagggcgacaacctacagtaactcctccagggccctccgtcggcgggcgtataacggcaggaagacgacctacagtcactcctcaagggccctccgtcggcaggcgcatagcgggacgacagcctacaccaacccctccgggccctactcaaagaccacctgtcggcacagcgacaaaagccccgacgccacctcacccttttgcgggtttcaccccgacggcaccaagagtaaaacctgccgtcccaggtcagagctcctcaaccgaagtctcggaagaggaagaggggaaccagatcgatacgacgcagcagtccgtcagcagcaccacgccctcaatgccgccgcagccggggtctctaccgcacctctccttccgacctcgcccgagcataggggggatggttcagggagggcgacggtcggggctcacaccggataggacggtccattttgcgactggggtgacggtcatggagtatgatgatgacccgagcacgccggtgtacgagaggtttagtgacgaggaggaggaggaggaggatgctccagcgccgcagcagattgcggggaggaagaggtcgatcgatgagactggggaggtggtggatcaaggggggagggagaatcccaagaggccgaagcctactgtggagggggggtcttctgagtcggaggagttttacggaaacatggcaggatattgattgttggtttagtttgtttggatattttgtcttttgggaaaaaaaccggttggggctattcggactttttcttgtgtttgccgcagtttgatttgtttagtattttgatagggtttagcggggaaaatgcatttagtatctttgcgcgatggtgactatttgaggtatgtaatgtgacttggaacaagatgattgtgatttctctcgttctcgtcccctataaatccagatagacggacggtgagttgcaaactggacattttcatcacgcacgtgcagtggaaggttgtcactgtggtattcaggggtaagtaaacaaacatttattcaggaggtgccaagatatctagcgtggtggagttgagagtggatcacggaaaaaagtaatcgccaaaaacatacaacaccagggattccccagtggtcacccacctgagtactgatctggcgataccagttttatcttttgagatatctaccacccaaatttgtgacagaacgagggctgaaaatggccgcgacagatcttcatgttaagcaattaacggctgtgcccgttttaaatggcgtagccataacgtccaaaacaccgttatgctagcgccactactttaaatagataattttaatccataatatttatatggattcccgccatcatttcgttgcgggttcacatcagctagccaacttaacccactatccattaaccattatccattaaccattatccatcaaccattatccatcaactattatccattaacgtactttataagcgagtcggtcatataagtgggccggtcacttttcgaccgcgacgcgtcctcctacactcaacatcaactttctctacaacccaacatgcctcctaccttaaatgaagccaggataatcttagctcttaaagctattcaaaagactccgaaattaagcctccgagccgcagtaaagctatataacataccattctcaaccctctgtgaccgacgcgccggccggcctgcacgacgcgatactacgcccacatcgaagaagctcactcaatccaaagaggatgctattgttcaacacattattgagctatgtgcgcgagcttttccaccaagattgcgtggtgtggaagatatggccaaccaactgctacgtgtacgcgacgcgccccctgttggcaagctctgggcatataacttcgttaaacgccagctacagctccgtacacgttttacgcgtagatacgactactagagggtcaagttcgaggatctaaaggttattaccgagtggtttacgctcgtacggaacactaaggctaagtacggtatcgtggataacgatatttataatttcgacgagactgggtttatgatgggtattatcttcgcgggtatggtggttacgacctcggacggccttaataaggcaaaactagcctagcctggcaaccgcgaatgggcaacggtaatccagggagtcaatgccttcggctgggccatccctccttttattattttagccgcgcagtactaccttactaactagtataccgagtgcaacctaccatctacctggcgtatcgcaaccaccgataatggctggactactaatctagtaggcctagattggtgttacaacctgcaccgggaatggatacagactgcaaggcagtacgccagaggtgaatatgacaggataatcgaaggttgtgacaagcgtctcagacaaggggttcactgtcaacaacaggtcgttctacaaagaactacttgcgagtagattgtagacaaatgaacttgattgcttgcgtgaggagtcagattcctcgacacggagagcgctgggcgctccctcctatttatgtgcagctatctacatatgtttctgaagtatctttgtaccttgctcagtgtgctcagtggtcttggcggctgagcagactgagcaatctttcatgatcgatgtgctcagtgtgctcagtggtcttggccactgatcagactgagcacctcctgattggtcacatggggactttgtgggtcttcccatccctggcccaatgattggctgaggtgtcccagcacctcgggaaccacccagtggttccttcacggggttattatgcttggggcgtaacaattggattaagcacttcgattattatatagcgtcccgtataaagggcaaataccggttgttaatcctcgacggccacgaaagccattacttaaccgaattcgagcgccactgccagcagaacaacattattacgctctatatacctccacactcctcccacctcctccagccactcgatattggctgctttaggccgttaaaataggcgtacggtcgccagatcgaggacttaatgcgtatgtatatcaaccatatttcccattcttacccgtgatctcgcgaccgaatcagccctaccatgtgcctattgagcttggctgtttggcataaccttggcatgtcctcattctgccctacggttggtgcaagtacgggttagttcacattgccaagcctcagctatcccttcttcataatcccgccgagtgaacatcatgccaaccctgccggcgccaagttgggcacacgtcttaagtactgcgggccgccctgtttagcttcgttgtggtctccttcttcacagccatgtcttcatgatggtacaaacaaacccacatgcagtagcctttttggccatcatggccagtgtgattcatccagcactggccaacgagtggactgggtggactcgcacaaacttactggccctggcaacatcttacttaccaaacggctgcgatccggagggtacaaccgggttaacgtcatgctacgagacatatgtcccgggtgttccttacatggtgaagcataccaacattccccctggtgccacaccgacgagcagttcaacgtacaccaaccgcgactgggacattaaaatggtcaccatcctcctgcccccggacgccgtcccccggtccgagattgacggctggtactggttccgatcaacgacaactaggcccccatctacgagcgacctttggtggattgaccacaccctcaccgccccagccagctgcccaactcgattcgagttcaccacatctcatctgctcaggtactggggcgaccgcctcccatccgagttcctcgacgagtacatgctccccaaagccaccgtcttcccagtctatacaaccacaccctcctataggggagcctacccgtcaccagtgagagagatccacgtcaagccgacggatctacccccaacccgcaacggtggacttcctctctacggagatgcaggccttttcatatcggatctcaagagcttcaatcaatcctatatcacacactgccatcttcctggcgagccgcgaccctgctcttacacctacgccgggaagtgcagcaagatcgagccgtggaagatcattgttgcggctgttatcccgtccatttttcttcttgggttcgtcgaaagtttcttctggttcaggcggttgatgctgggcaagtcgtgtctccggttgggaacggtgtgctggaatctgatcttcatttttctcgtctttttcacggcgatagaggataaaagaagcccagagcatcaggccgacttcagggagcagtggaagaagatgtcactcatgacaaagatcaagttatggggccagtttggatttcggcatcggtatccggtggagtggttgggagaaaggaagccgacgggtcgggtcacggagagtatcgagatgacaagaggtggcggtaatggaggagctgggagaggaggacagcgggtggaggatgatgatatacctccagcttaccctggtcctcctgcgtaggtggctggtgggactgcttggtgttgggcacctaaccgaaatccggtgtcgatgcctgtctaggcgagtgagtcatgtaattatgctagatacccctgcttaacggttagttattgaattagctaggcaaaatgttaactttcttgtgtaacgggaatgtttgttttgaaggcgtcgacatgattttttgtttgtggctaaccattggtcaatggatatgcagttatcctcaagcctctggactgacatccaataattcccatccgaccacatgatcaaggatggcccttgaagaggggtaagaagttgcataaaaggaaggagccccccagggtttccccctcaatccatgctctagaatctttccccccaacaccgaacatcgccatcaccagacatcctgtcatggcaccaccaaaaacgctgacaacgctaccgaatgaggttctgctgcgcatctgcaagctcctctccgactcacacttttccagcctgagagcgctttcacaagccaaccgacattgtttctctgttgccgccgcggctctcgttgatacaattaccttttacatcggtgatcccgctcaattggcccaagatgttgagaactgcaaacaagtactccagcagcggaatcacaatttattttcccatgttcgccgcctcatcatagttggctgcatgggggagctggatagtaggcagatcaatccgcttcaccccgaatacgcaaaccgatcctggcatctatcactgccctggaccacagactttgacacagctcgcgcacatctacacggtttcctccccgggtcctccaatggacgcagcgcaatccccttgactactttcaattgcaattggggcacatcagtaagttctattctaagctggaaagtgtactcgggttggcaaggagagtgtaaacagacatggacagccctgtaatagaatcgttcttggagtctgatattttctcgtttattctcggccgaaaaaagggcttgcatcaataggtattattgagcagttctcttatttatttgttgagagggttggtgttgaaccacgtcgagggcagtggataggaaaaactctttgatatggtacctaatcgacgggagataatcatgcttagccggggcctaccatgcgagagtcagattaaaatagagatgaagttcaatgatttatttatgggacttatggaaccgcacataagattaacgaactttagatacctactatcagtatactctcataaacccctccagaggtttgggaattctagtcttctcagctgaggctttctctcaaagatcaagatcaacccttcttggctttgactgagtattcctgaacattttgaatcaaacaagtcagcaaaggaaaagggtcccaaaatacttcatgttaccgcagtttgtaggtacggtttccattcaacttacctcaaactgtttgaaaaagtcctttaatcgcttatcgacctcggccttatctcttgtcctctgagcgtccttgttcctcaggaaagccagctgatccgcaagggggaactttgagttggcaggaccgtaggagcccaggaaacgaagcatggttagcatctcatttgactctgtcaacttgagcgcctcccacttgttcttgtcgagcgcgtatctcgccaagtatagaagggccccgcagagcccggaggcgattgccgttgctacggagcttccgctgtgttctgtgggaagcctgtctaggctcaggttgaggggcacgttctctcccggaaggaggatgtcgtagtcttctttgtgtacccagtcgcatcgctccccagtgccggttgaggcaccgactcgaacgcagtggtgactggctgccgggaagcagaacaggtgggtgctgttaccttggtcactagcggcgcagagcattaggatgcctttttgtttggcgttgttgagtgctgaagtcaagccgctgatctcctcggaggatttgctgctcttttcgatggtccagctcatggagatgatgtcgacattgcaacgaatggcccactcgatggcctagaagtaaagaagggttaaaccaacatcctgaacctttcccctgcataaatctctggggaagtcttgaaaatatacaataaaaaggctgagacttacatcagccgccgaacgcgcagttatgtggcgctttccgtgcactccgcctgatctctcatcaagtttggccacgtacagccgtgcccgagggaatatgcgtaaaatgaaagcagccatgatggtgccgtgctggtcactggttgaaacaaaataaggcacggttgaatcatctaggccgttttgcgagcaaaaggaggcgcccgacacgatcttgccgtcgaacctatcgaggcaagcgtcaattccgtcgtcgatgatggcgatcttgactgtcttgtcgtcgtcggcttccttggaatctttgattgagcgaatgaacttgcatactggttgaatatcttgcatccacttgttgtcgctgttttccagagaaggtggtttaacaggttagcttctccatttcttgtccaggtgaacaagttttggatacatacttctggctgctttttgtgcctattgtcttgaaacttgacctgaaactgcgaaagccgggatcctctgcatcgatgatggtgatgtttgtgatctcggtggtggtttcggttgtaggtgaagtctgaacaggtgctggtaagcgttcaaccatgccataatccccatcgggattctgatggtgttcagtgtcaggttgatggggctcgtgggtcggtcctccgttcgtaagattcccgttcgtaagtttcccgtttggaagttgagcaggttctgagtggttgatgcgctctcggaatcttttgatctgattctctactctctgtttgctctctaagccctatatccgtacgttagctcaatgcttgatgtaacggaactgacgtagacagcaattaccatatcataatacagcaatatcttttgtaactgcaccaggaacacggagattaaagaaaagtgttagctaacaattcatgtaggggaacttgtcgttgtttagcatgatcacgggcaacataccttcctgaacttctcgcggttagcaaacccttcgttactgtaccaacccaacatggtagcggcatttcctgaccagtaaagcgagacctcgcggacatttggggctacagaatagatgacatcgctgcagatgtcaggcttcttccagtcccagatttccacatccaagttcatcaaggcctgctcgatcgcgccgtcggaatgtggtcgatcgctgtcgtcgatgacaacaaccctctttattgtgcggacatggttctctcgtagccactgaaataccgataccaggtctcgtctgcctttcccattcatcatggcttcgttcgttttggcattggccaccacagcctcagatcttcgctcgccagcataatttgcgccgcttcgtgcattggagtttgcctgtgagatggggaacccattttcgaccggatctgtttcgaagatcaagctcgggagactaacacatatgagaatggattcaaacttcaagtgcttgacgagtcgtttcaggtagtctttggttaaagtctggccacggagccccgataggctgaattcgaggtgtctctctttggtgtttagaaaagaaacggttagcccgttgagatatcttcaatgacttcgaaaacaaaagaacaaaatagagaaagagacttaccctcaccaggagcgtaaagagcctgcaaaagattctttctattggtgcgaaatttgtcgatgcaaaacagcttcatcatggtgagtatctcgtctgttccatacacctcggccaaagccgtttgcaaagcttgctcgcgggccgtcttcttgagtttgtccttgatgggccccggaaggcccctgaactccgtcgtcgcatgtgctcggtatgctttccagatcctgctcactagtccctctactctggtctggaagggggtcaaattgagtgccttgttatgtttcttgtccttatcttctgaatagttcatcctggccaggattgctcgaacattgctggcagtgttttggataaactcggattccatcaagagtttcaccatctcgagcctcttctcgtcaactgggcttttatttaccacttgcaaagatatcagctccaacctcatgtcggccttcattgattcatttactattgtcgccagcggggggtcagtgacaaagttgatggccagagtctcttcttgccgaagcatgactgcatggtgcagagcagtggacttatcagcaagagactgctgagcgaaaacattgcttctgcggacgcctccggcttcgtttccaatccgagcgcagagtttgatgattcgattgacatgctccgagttgtgcttcacggcgaggtaaagacaagtctcgtcgtctcgattccgatgttgaaggatttgcccaagggtagacgagggcgcaatctccgagtcctccggctcgagaccatccaaagcaatcttgacaaaggcatggttctcgtggtagagagcgaaatgcaaaggaattgagtcgtcctttttgtattcgcacttgagcatgtgctcatagtttttgaggagccatctcaagaaagacctgccgtccccggcttctccttcgtgcttgtcctgccaccagtcatcctctgatttatccgctagcttatggagaatgtttccgctcgtcgaggttcgttcgttgtttgccgtgttgagaaactctctgtacttcttctcaaacgctacgctctggtccggtttgctaaaatcgacagcttttgcggcttccaagacagtggactgcttgattgcacctccggaaccttgaagagtgttggtagagaatgttggttgttcctcgtctccactgtcgtcaaacctggataacctgaactgcgccattgccgacttttggaaagggacttcaagtcaagagtgcggtgggtctcgtcgtaaaaaggaggagtcttgccgggggaaaaaagtcaaacaagctgattcctgaagggcaaaaaataaagagcttgacgactgagatgcaagcagaagaacgggaggacatgggtcagacttgccaggtttcagttagcattggacagaggcttagagccaggcagaaaaagcttagcacagtacggaatttcttttctgtcaagactgtcgagacaaaaagcatgatctgatttcgttgtaaatgtacatgtacatacatgtattaataatgcatatgcatatgcatatcttcggcccaggggtcctcgctgataaggacatggatcttagactacattcggcacaatctattggtgaacgcaggccagccttgcttgtcgagatggggggcggcctcgacccctctatattgaagcccaaactgaatgagtggaggagagtatgtcgtgataaaagtggaaatctgctcagtgctaaatatgcagtgtggtcagttgagatgcattatcgtcttgtgatacccatccccctatgccacctctgcatagcactttcattcatgctacaaggcaataccatactcgcctgatctggtgcatttatagactcaggaacatccaaccctcgaattcggcaatcaaccataccagctacggtatccgttgttgttattatggactttgtcgatatccctctgtttcccaagtcagatgacgatgattcgtttcggacgaggagggatcccaatcaggcattcgataccgagaatcccacaaccatgataaccagaggaaatcatggaggagttgtgaggaccagagccgtgctgaccaaagtgcatgctgggaccatcacgaaaggcgggccacgcggaacattgttggtgtttgagtttcgcttccagtccccaaacaagcgtcgatttacaaatgcaaagctcattgtcgagttcgaggacagcagtgggcgcaacgactacaccttggacccagtggtgtgcaagattgtgccgaatggctcctttgcgctgaacagggctgaaagcaaatctgacatcagcaagaagttcactggctctctaggaagcggcctggacggaattgttgaagcaagtctggggttcgagtgggaggtgtcaagggaaattaccaaggaacattacaccagcctgacgggaattccaagcaacgaacgcgaggacgaatatggggaagataactcggccatttgggagctggatgaggacgaggagcttgccaagaaagctgggatccccaggtacctcaggacagcggtgctccttcgacaccctcacaacagatcttttctcgtcaagctgagcgtggaaaccaaggtcgatttcggaaccgacattcggaccttcttcgggatgggacagacggaagctgttgacccagtcaacattgatcctgccaaactcggacagacagtggaggagctggaaaacatggctgagctgaagagtgtcgatgttgcatttgcgacgccacttgagacaaataattgagttggattggcaggaatcaggaaatccagttagcaatggcggttgacgcgattctttttccaatgctgtaatgtacaggtatatgtacaagtgtctggtgtgcggagaagggaagggtccttcctgtcttgttgggctgacatgcagctgccacctacacttatcaaattcaaatgggtgcggggtgtagtttagcggtgcctgtgtaccatgcaaggaattttcggagtgcccagccaggctgggcacatgctttgatttcaggaggaaagagctgtggaagaatgtgaatcgtcaggtcaattagccacttcaggcaggcacccaatgaatttaacgacctattttctccaaacaccacctaacaatgccgtacagttcacctttgaccaccgatcagctagcacagccaattctacctgccctggcaaataatttcagttctcctcccggcatacctctttaattactattacctttcgccacgagaacataccagcaatcggcaaccaacaatgccatccctatagtaagtgccagaataaagagaataggtatatcagattgacttcttcatcctgctcacaatatcttctctacttgttagtattgtgctggtctgtggtgtgtgtgcttcacgcagtaccgcacagtcaaaagacacgcttgaaaaggttttcggcgaccgcttcccagaggcccgcatcatagtatttgatggactccgttcggacaacaatcacttatcacagacaggatgggtctggcgggcagcggatgacctgcttcagctcttaaaagaggaggtggggttgctggaaaagtccatctataggagtcccatcttgtttctggcagagaatgtaggagggatcgtgttaaagcaggctctcatcgaagccatgagagactggcgctatcaagactttgtctggagaactacaagcttggtcagtcaggacatcaacagcgagccaccaagttgaccttgtatgctgactagctcaccgagcttcacagttctttttcggcaccctgcatcgggttgacatcaactcctcaattgacaagcagttcatgcggctggttctagccacagaagaagagattcctgattctctcatcttcattgcggagtcaacagcagccttcccatcagtgagcgcgcaattctcacaactgctgtccatgttttctgttgtcaacttcattgaggacgatgaaaaagtatcggtggttggaaggttctcgtcaacctttggtcatgccgccgagagtaacgtagctgccaattgtagctatcaagagttgtggcactttgcacctggcgacccgaagactgacaggctctgggggctaatccaaagcaggatgaaaagcgaaggtgagtacaaccactgtatgcagatgtgactctcctcaagtcatgctgatgagatggctgcaatcactagcatccgaggttgaatactccattttcatgcaagcacttgctgaaagggatcccgggacacacctggacggtgtcactgctcaaagagagcacccgacgatgagatggattgcatcacacagcatttacttggaatggctcgcgtcctcagcacccgccttcctccacctgcatggcaaacctggctctggatcttccgctgttgcgggtgtcatcatggaagaagtggcagcgattcccgacttccaagacgcaacattcgtcaggttcaattctcacaagcagtatatccaaacatcagagacggccaggattcttctttccttgtgccgccaaattctgtcggcgaatcccaagttatttcgacgtaccaagccgctttgcaggaccatgcgagcagataatctcttcaacaagtccgccgcctggggtctcttccagtcccttctcaactttcattcaggtcccttatttatctgccttgatggaatacacaatttgccgcctgacttcctcgaataccttagcaccatcaaatctctaaagcaagagagtggagagcccccgagatttcttgtcaccagttcctcggaaacactccccatttttccggattcattgaagtcgacaatcgcaacattgagcctcagtgacgaagcggacatgaagcgagccaccaaacaagccgtccagaggagggtattggacattgcttggcggaatgtgctctggtatgacctccagaaaacgattatcaagacagtttgccacgatttaccaccttatcttgttgctatgcagtcgctggatctgttggatgtttcgacgccgcattcaacggaagcggccttttacttcacaagcttgagcaccttccccgcacacttgatggtttatactcacattatatcgcgatcctgtctcggtgggagcgtcaagttctgggctgtattgtcacggcggtccaaccgctgcgcagtgttgaacttgccatttgtctgtctctgcagggggaggagacccaaagttggcgagatctacgcagccggacttcgcaggatatcatcaaagacattcttggacataaaaagatacggcatctggtaaaggtcagagacgatagggtgtatcccatctacgagactctgaccgactatctgcacacaaaacacaagcaggtctccaaacagttgcatttgtcaatgctgaaggcctgtatcaagtacatcagcgacctctaccacgatacatctttcctattgggtctgacctcaacccctgagcttggatccaatatcacgcaggatgccacgctttccaaggaagccgggtttctaagatacgcgagcctgtgctggccggaccactacaacctttgtcatggtgatcctcaagcatacagaacggtttctcagctctttggaaaccctgcgctgcgttccacctggttcagtctctatgcacacttcaaaagccacctcccggaaaatcttgagtctctgacatctcccttggccatggctaacaagcttgggcttacactaattgtcgatgatatgattcgaggagccataccgggaggcgaccattccaagacgacctggtccaaccctctggcagattcatcaatctcaagcaggatgccctgggccgatactttggaggtcaaacatcagctggtccaggaagtcatcacttttgcagtcgaggaagggagagcagagctcatctttcaactgacttctgtcctatcacccgacacgctcgagattaagggtcacaagggacttactccactgctcagcgcaaccagaaacgggcacatggacgttgtgaatgctctggtcaagcaaggggcatcctccaaagcaacggggcgagacgggtcgactatcctgcatctggcaacaagactgggaagcctgtccatcgtcaagcggatcctcgagatcaacagccagcttgatattggagcaatgaacaatgagggatatgacgctatcaagattgcagcagaatcgggctttactacgattttggaggagctcctgcaccggatagatcccgagaccagaaagaaacttgtcaacacgccgctgccatcaagtagtcagactcccctttttctggctgcgagacacggacattcggaagtggtaaagttgttgctgaaacacaaagccgatcccggcatccacaatgacggcgaatcgagtgctctctaccaagccgccaaggagggagacagtgacgtttttaccgctcttctcacccaccctatgtaccagaagttgagcattcacccgcaggtcattggtcctttcaatgatgcagatggggaaagctccatagccagtgacgatcttgatgcatgcctccttgtcgctgcacgatacgggcgagtccccatcctgaagaagcttctcgagtacaaggttcgggttaacgtaacaggcgaaggaaagaacacagcacttcatttggctgcacgagagggctttgaacaggccacaacgcttctactgaagcaacactgcgaggtggacctgcggaacgaggaacggctgacgccaattcagctggcagcacaaaacggacatatcggtgttgtcaggactcttcacaaagaagggaaagcaaatattgcaaggggccccgacccagaacctccgctaccatttcggtcagcactgtccacgttagagatggcggccatggaaggccaagttcccgtcgttgaatacctgttggtgatggatccagcatcggctcctcgggccctccagctggcggccgagaatggacaaaccgctgtggtgcgttatctgatggccaatcaagaccagatttcagtgtcagtggcatgggatgatgcagcatggatcgaagcagccggagcagcgctcaagaagcgccacctcgaagtgctcagggagcttttaaccttcaagttgtccggcgtgggagaaacaggactaccagctatttcacaagagttttaccacctgctgtacatggctatcgagaaaaattacgggcctgaggttcaagttctggctgagaagggtttcgatatgaacaagccaaacgtcaagaacgagcacccgctccatctggcggtcaagtggaacagtcccaacgtcattgtgccccttgtaaaaggagggtctagtctaggtcatatcgacgacacccaaaaggatacgcccttgtatcgggctgtttctcgaaaccacgcagaacaagtggtgcacgagcttcttgaggcgggtgcagaccccaactggaaaaacttgggccaggaggaccgaacgccgctgcatcaagcgtgctctgtcaacaaggacaactcgttgattataacctgtcttttggaccaccaggcagacgccctcgccagagatgatgatggttggactcctctccactacacgaccgacaagttcagccttcccaatgccatcgcgctcgtgggtatcaaccgagaacgcacccacttgattgaaatacgcaataactaccaatcaacccccctggtgcttgctgcggaaaacggcgccgtggatgtgatggagttctttttggagtgcggggcggatcctatgctaaccaacaagaccggctcgtctgctctccatcgtgccgcaggaggcgcccacctcgacgcggtgaagctactcattgagaataggttcaagacagctgatccgaccatgtccaaagccaacggcataacggcgcttcacatggctatccacaactccgttccccagctcgagatggtcgagtatctcctaagcagagatggcgttgatattaatgcccaaagctccaactttggaagccctctctgtgctgcagctcggttctattcgacgggttactttacaccaaaaggcgatgggctgaagctctgcaagctcctgatggaaaggggagctgatgtaaattctaccggagggtggatgtattctccacttcatatcgccgctgagcatgggtctgccgagcttgtcaaactcctgttgagtaaagacgacaccaatgtcgacattttctgggaggaacatggaacacccctgagcgtggctatcctccatgagcacgagacggtggtgggaattcttctccagagaggcgctgacctcaacattccacttgatggggaaaccgcagtgcagcttgcagtgaggacaggggattcgggcgtggtggaaacactccttgaaaagaggctggaaaaattccaggttgtacagggtcttgaagatgctctgtgggcggcggttcgcaaggatatgccacaagctgtgaaggcgctcctggccgaacgcagcaaagatccatcctccaccccagacacaatcattcaaggctggaccatacttacatatgcaatttactgggactcggatgatgtgattggctatctgttagacaatcccgagcagcacgacgccaacatcgatcaccacaacgacgctggtaacgcgcccctacacatggccatcgagaaaggcgcagatgagctgctcggacagcttctcgatcacaaggcagaaccaaacatttgcgatcgagtgggaaggaccccgctgatgctgagtgccaagaaagccgatctcgacgtgatggatatgctgataagtaaagggggaaacgttttcagcaaggaccttcgcctacgagatgctctctactgggcttgcctctcgcaatccagcgatgccgtcaccaagattgtggccgtgatgcaaaacaagggcagcgagtggctcacatcctgctcggctgccatcttccccgtcctccatgccagcgaagcaagacagaacctgctcgaggcactgttcaaaggagaggacatgacggcgcgcaaagaagttcttgccgggatagcagtggataggaacaactggacattggcctacacgcttaaacacagccacacaccctcggtcacgtccgacacagacttcttacccggctggttcgtagagtatgctcaggaagcggcagacaaaagtaagttgttgcaacccagggtctttgtggagctaacaggtgaacaaaacatcgcaaagacgcttcttctacggttgagccaaacactccatccaggtgggacgatgttgatgcagcgcaccctcttgaggtgtccccggatgggcagaccgtcacggttggcccaaaaccactcatgaccgggggagtggccatgtacgcgttgatccgcgccgactattgcatacccgcccacgaggattaccaatttgaagtcaccgttaacgacccagttggtgatatgatagatgagagtggcccgtaagtacctacctacctacttatctaccttacctaccttaccgccttcaatttgagcgaagagttcaattgttgtgtcccgacaacaagtaccttctgttggattaacttgatttcgacgtgctatagttttcccattggaattggactctgtacggaaaaggtagatctcaaccagatgataggatgggaatcgggttctttggggtatcacggcgatgacgggaaaatgttcttgggatcggaatgggggcgaaggtacgctgatgggtatggtgtcaacgacacgatagtttgcaaggtcaaggtgggcgatggacagagaaaggtctccttcttgaagaataacaaaccccttggtaagtggagcttcgttttgttcttgttttgtttcttcctaccggtacctggtctacctatatgcacctaggtacctacacgtacaggaccacccagaacaaatgtctgtcacgattataaactacgtacgtaactaacattagccctaacaattgggttgtcaggaactgctttggaaggggacgatgtgcctcggggacagctttaccctgcaatcagcatgaagagttccctgaaaggactttcgatgacggcgagatttggaaatccgagcgacgtgatgggcccggggttattactaacacctgatatccaaagccctggaagaatgagacatgcctcgccgtcgccagccatgcatcctgattctcctggtgtttgcgtagaggaagtgagagaagacgaggttgaggatggggacagtgattactcttggtagtagcttttgcatggatcaagattgggtggaatacttacctctgtaatttattgtcatttcacacttgaggtagttaaccaggtgggtaggcctttgatcaagggaatgattgctggaattttggttaatttcttcttgaggctatggattcaaatttgaagcaatcagcggatgttacgaactgagacattgctcttaaaagttaaaagactttaccccatctacaattttcaaatgttcaacaatacggcgcgatttattctgtgccataaatattggatataactgtgttttttgatctacctcagttgctagaagttgtgatggctgatggcacttattagtttacaagctcacatactgaccactatactacggaagatgtacaggtgttgagcacctgtcgtagtgagaggattggttgcaaggaaaaggcggaggtggtatatataaggggagtatacacgatcccgtcccttgaaccactttttgcgatccgcttctagctcaggccttcctcgtcagatatggagtgcagcagtgcaacctttcagcgatgaagtgcgctggacacaatacataggccggcactgggtttggtagcccagttgttgcctccgagttattatcgccaagtagacccctttgtcttaacgtcataacgccccattcttaactttctattaaagccaagggtttcgatcaataatagtaacgacgggtgacgggttgagtctcggagctacggaagaataccttactgttgatggtggttagtagtggcggtcaccgtcgttatctagttaaacgagagtaaactggggacgtcggtttgtgttaggggaaaaagtaaaacgccgcagtaagtaactactgcgatatatataggagaaccctatctaaatctacctagtaagaatagttaaatatcctgtatactaaaactatatccgttgaagcaaatagcctctcaaaatccctttaaaaaatattatatatctatatagttaaatcatcaagacctagaaaaagaaataagaaaggtaaaaagtcgtaacgtatacccggggcttacgttggaaaccctataaactccaacgctaccaactcgaaaaaaggcgagtcattacaaagccttatagtatgtgccatcttttaaatactaagcccaggctctaactaaactcatgcaaatagcgccaaaaagcataaggaagtaggctgtaacccgcttacgaccgcggaaggtagtttagctattatcactaagaaagtcctccgtaagtaactcgataagggcggtaaaaacaagcaatcccgataagatagcgttcatagttcctactaagatcaggctaaacttagagtcgggggcgtaaagcgtgtgggtggctagaccaatagcttaaccaataggtatcctgaagacggcaccgttagctttatcttctattgagcacaccggctatttaataataatacttacgtatatccataaactaatactataaactatagctataacacccccttttgccagttaatagaggcaatacgagttcctaatgcgagacccttaaacgtttttgcaataatatattagtatttttatagttttgagacaaacaggaaagcgtttactactcacggtaaaaagcaatagcaattaacaagacaacaaagttaccgccgacggcgacacttaacgccataccaataaaaatactgtgaaacaagataccgacctcgagaagcatgcacttcaagatcttcttcttgtgtagctgctcctcagtaaggccgacttgctgggattccatagcgctcccaagcagttccttagacctcatcttctcatctggggaaacggccggggtttcacgcccaaccgccacactctcttcggaaacaggctcaacaacatgtaaagatgcggtcgtcgagctcgggaacactgaggtagatggtatcgaggagagtggtcacggtgatgtctggcgggagatgggtcaagtatagggatgaagactcattcggatcgatcgtggcggagtggttatgggggttggtaaagtcaccttggtagttcactgaaggcaatctcggctcggctggctggtaaggggtggtctgttcagcctggtaagactgagggttggccagcaggtctggctggtagtactgatgaccgatagactgccctgtggtaatcctagcgccttggtaaggttgaagaccggcgatctgagccgacaggtagaattcataaccgagagactgctcgtcaggctggtagctgggaagatgtgaagcctggtaaaaatgatcggccaagggctggtcgtgctggtagaattgctgaacgaaagactgctcggcggttgaaaaatggtgtgacatctcgctctaggggtttgtgagggttggagatgggatggtcgaagacagaatcaccgcatgggacgtggcgcctccaaaacagctaccatccgaggaagctggtgacatcagcgtatagagagggctagaattgggaggggtcctagggtttttctgatccaacacttggggcatgatgcttctagacaagtatctctctctccagttgctggactgggtagccctctgctctgtttggcgaggttcagcccttccactggcagcttgagcattgtaggaactctctccttgcccaagtggtgttagtcttgacctgggtacctataaagatgttagttgacaagaggatggcgtcccatgagacttgtgtattaacctaccggaatgtgccgggtcggatttccttgaccgctcatcatgttgaaggcttttcggttttgcttgaacgatattgtggaggcgcagtgttatggctgcagcctaaatgaagctgttggatgggtagtgagccgtcaagatgtgaacgagatgccgtgaaggagatgatgtgatggggatgatgtgacggagagagggtgtgaaagagatgtggaagatgagatgggttatgtagtgttgagagactgggtgtgaaggtgtgaacagacgaggctttgctgtcagaaacctcgctggctgtttggaagtctattcctcaagaagaagaggagatagaattcaagttagtgatcaaatatatatcctagaagctcgagatctgtcggtgccactcgaagatgttcactcccaaagtgggtcctggttgtgatattcaccttggtgttgaatacctcagtctctgacccagtccgaactcaagagcaacttgctctcattcaacgcgttaacaataatacgttccacctgtaggaatcagaccaaacttccgatgaagtcgcccatgctcactgtgggagcagcctgtggatcaaaaatacaattcggattgaggcattcaattaattgatggagcatgctgatgaagggaattcggattgtggcgttttaggactttgataacagtgtccgtcaaatttcacaatgtcagtaaagacaatagcacgtcgagtgagtattgctcagggtattcaacgagatggcactcgcaattgggtgaataagggatatatccagaggccaaagccattgccaaaggccatcataggtactagacacaagcgggtcttctcgaacaagatcttaaccaaactgaacgccaccacataccttgaatacatgttcaaaacctaaaccaaagtgctgctgggcacgttgtggaccgaaaaatggtgactgcgacgttggacaaaggcattcacagacagcgaagatgcctataagtaaatagccgtggaatgtcgattaaaacctcaaagtacgttgtgagttagctcgactgccacgcacaaatgcgtgggctgaaacacagtcctcgatgaacaccgcacatagtgcaagtagctcaatgctgttgtctgtcagtgatgatcagatgaacgatatatcatagttcaggtgacagccctgaaaaactttcggacgaaaaaggtaccaccacagataaaagaaccccacaaaaagtcggataaaaatgccgaaacccaaatgaatcggattgcaactcatcagcttagtgcttgtttcttgaacgagccgccgaatcttggcagcaaaagggagggagcaaaatgaaggtatcattgtgcatctatgatgagtactaagtcgtcatgaaaattgatcatatgtgtgcttggtgagatgctaggtaggcctgaaaataagcaacccgtgtcaaatgaaattgccatgtccaccatgcccatcaggttcatgatgtatttcccacgagcctggaatggtatgcacactcggacacggtggtgctgtcgtcgccggcgctggtggtggcggccgaggtggaggagcaggcgccggtggtggagatggtgtagtcggaaaaggcagcttactccctgctgccgcgcttaggttattcttcctccgattcaacctaaccgtcgtcgcaggcctcggagcataaatcaccgtgtccggcgaaaccggcctctcgcccttccccccaggcatctcctgcatcggatccgccctctgcatcaaagcaggcgagctcgccgtaaaatacgaatcagaagccgacgccctcggaaccaacagctcctccaacctctgactatccctctgcggcggcccaataggactctccggtgtcggcgcacgacccggacgactcagctcaggactcttcaccagcgccagaacagccggagcaggtgcctgaaggatatacctcctcacccttcccatcttcccagacctcatcctgcttggcaagctcgacccactgatattagacgcagactttgacggcattttcggccgatagctcttgaatccctggggcgtcgcccgtatggtgttttcacccgttatgccatccctcccatcaccagaagtgctgtatgatcccctcgcctgcttctcatcgtactcctcctcactgtcaatctcctcattcctcgacgacatccccgggatatcaaacggcctactggccacatgcaccacaaccataaccacactcccaaaaaccacccccaacgaacacgcaaacatatccagattcaacctcaccgtcctatgcccccctcccccatggtatatccccaccgcaacggcaataatagcactgctccacatcaccaccgccaaccgtatcaccaccccagcccaggcatgaagctggtgcttgaagctcgggatgggagggtcgaagttgaggtagaggctgtcgcccttcttggcggcaaggaaatggaggatgatgtaaaagaaggataatatcgactgtttgtcccaccttgtcagctacagtctcctggagagtgtcaagaaatactcacagcaaacagcacaaaactctgcgcaattcccaccccttccctcttcagatcccccgtgctctcaaatacaacccctgatagcgacgccccgatggtactccctattcccatcgccaccagcgcccctagcatcagccgcgggagccatgtctccgcctttgttctcgagtggtagctgtggctctcggtgtaggatgccccgcctcctggcaataacgccggcatcctttcctcgctttgacgcctgtctactttgactttgttgagcttctcgctgcctagaacaaagtgtgaaactttgggtcgatgatacggcgatgatgcgtcgacggcaaggttgcgctgatgccaggcgtcggaaggggatccagtccctgcggacaaaagaaaaatgcccgttagagtaatgagagcatgtaaaaagatgaagtatctgctgggggtgcgaaagaaaacaggaactagaacgatgagagggatagcatgcaaaaagtgtgatcaatcatcctacaaatccttccaccaaaaagaatgccccgccaccagagctgccaccaaaaaaagagcacattctcgatgacggcggaagagtatgccaaagaggctggtgcccctcgagctggatatctggctggaatgcgacggatttggaagctggaaaacagatgggctcccacaagccctaaccgagaaacacatccagagccacagctggaatgtaagtctgacctgaattgagctggctatctttactccaggaaaacagaaggagtatcacaaatagaaacaaaaaggcagggttgttgtagaaatatgtcgttattcattgtccccttgcgtccacaatcttctgcatagagcaaagttaaaagtcttcgccaaccatggccttcttggtgccagtccaaccatcgcgctcgtagtagcggaaaactaggtcgtaatcctcaaactcgtgaatgatgcggtcgatgcggcggtatccatcaatccggtccactgtctgcttgaccaagcttctctggttgtcctcgacatcagcaccatcgctaggggtcgtgggcttattcttggtctggaatagggtgacagtgaagcgaccaggtcggaagatgttgatcacgtggtcaatgacctcggaagtctggcgtccattctggccactcggcacgttggtctcgaacgaagcgtatgagcaaatgggctccggggtgacatggacagtgaagtagtgcgcagctctactggcagcatcatcgctggacttggtgggtgcaggaatgactccgttggcggaatatccgcaaggggtgaaaagataggagtcgatgcgagcctcggggtagaccgaggtgggataaacttcagccagaccacacttgttggaaatgacagtgccgagagcatggccctcaccagatttgtcagagtcctccaggtaccactgcttggcaagctcctggtcgagatccatcatcaagatctcgagcgtctcgtcatcgttgtcgtcgagggatcccacacaaggcgccacaatgcctgtggggatcttggcggagcgggtagggcttccgccggtgctagagctaggggttctaggcggggtcaaggtggaagtggtaggtgaggtcatgtacaaataccaatgatccgcattcatgcgaccgaccagataggcgctaccattctcgaacagttcgtccaggaacttgacctcttccttccagctggagtgggggccttgttggcgatcagggaagaggaaattcttgcggctgtaaaagacacggtgaggtgtggcggcaacgcgctcatcctccagtgtcttgacgttgtggaaagggaatccggcatcgatagcagcgatgcgaagaagacggcgcaggcccagcaacagggtggtggtgccgcaggtcttgaggataagcttgtgggggaacacaaacatgctagactcggaaaggaggtaggcgtcaacgtgatcagagttgacgatggacaggaccttgcagttgaccatatccaacatgccctcccagatggaggggctgaccgacttcaggccattctctttgaccccaggaggaagagtcttagcactcggcgcaaaccagacctcgagaagtttctcgggtccctcaaaggcgttggtggagtccaagtcagcggtaatctcgtggttgatggtgagctgggtctcctcagcggcgacgctgttggtgacgttggtggaagtcatgtttggcgaggtttggggtgtgtcggctatgttctctggtgaaaacgtccgcgggacactagctgccgctcaaacgaacctttaggtcgcttgagagagtaggcccacaggaaaggggtctcgctttagaggctggcgacgccagcagcaggtgttcgggaggtggtatctgaacgtctcgcaagcggacgttagggggggcgggcacggagggtgacgcgatagcgctttgagagcggaatgttgggcttgcgcttaaaacaggcttttattgcaggtaaaccgatacctgggcgcgagtatcggagatgatggtggagtaaaccaaggaaggggtgatagtgaagctatatcgtcgggatctagattcgaagagttagactggtgctgggaatcagggtatatgtaggtcgcgctggaagaagcatttaaacaaagcttgtcatggtgaagaaaattgtgtgttgaaacgggagggacgattagcataccaggaccttccaatggctgtgcgcatctcaagatgggatggtcgtcggtggtgttgaaagtttgcgcggcaatgcgataggtgcaaaagctgtggtgggatgctctcgaagctgccccttggcacgacagaatcgaatcggtcggaagatcggcaacaagtggcagtggttttcttgttttgtttgtaagcaagtaggtctacctggctgtgagccaatggcacaggggaaaaaataaaaatatccggttgctgagagaattttggcatttggttcttcaagtgggatgtgattcttctctgcgtttttttttccatggatggcggggtttgctcacccctgtcagccgttgcccaatgctcccaaggtcgtggaagctcaagggggtgtgccggtcccactgttagtagaccacactcgtccctctatcaaccctgagcacaaccctaacaatgcttcatcaacgatgataatttttgcctttctcgaccacgggccgataagacccgtttcattgaaaaagtcccgttacttcattgccctgacagcttacaacacgtgaaccctgataaaccattgaagttatcgcgatggcatggtgggttatgaattgaccgcctacgacccctatgagtctaccctcctatatcacgcgcccccttgctcaactgccgaaacaacatcagcagtaatcgtcttgaatatcggcgccaacgagcagtccttgtactttagtaccagttgcgcggtatctctcttagcctcctcagcctccgcctcctttgcagctgccgagatatcttgcccattaataactgttccctctggatatcgcggcctctttcccgtctcaaccaagacaataaactgctggtcgatgggaacacgccccaagaacttgacattgaagtcatcggccatgacttcacctcctccactgccaaaaatgttggtgcactcgctgcaattcgggcaaacaaagccgcacatgttctcgacaacgcccaatatacggatccccgtcttggtgcagaagttgagttctttcctcacgtcggcagtagccactgcctgaggggttgtcacaattaccgccccggcgacctgatctggccgtgccttttgaagcagtgtctcggcaagagagatgtgctcatcactcgtgccaggtggtgtatcgatgagaaggtagtcgagctcctcccagaagacatctgacaagaactggcgcaccatggctgtctttttcggcccgcgccataccacagcatcgcctcgcccagggagtaaaaaccccagactcatgacgcgaagcgaaccaagtccagaagttggatcggcttcatggacagtgatgggtagccagcccccgggtgcctgtgtcactttggcatcctcgatggcaaacatgcgcggtatcgatggccccgtgaggtcaacatcgagaacaccgaccgagtggccagctaatgagagtgacaatgcgagctgggtagtcacggatgactttccgacaccgcccttgcctgagaggacctgcagattcgttagcatgagtttggtcatgatggccatgacgatggcggggcagagtgccaaggtggggcaaacggacaaggacgatgtgttttatcttggatagcgacattcgatatatgtgcgaaagtcgaactttgttattgaggtccagtgcttactgagagtttgaccaaatgagtctccgtcagggtggttgaaagagcgccatcttgaaagtcgaaaggcttcttgggaaatggttagtttgcctcccaaaatcgaggtgcccctccacccaccgatttgcggcctgtatcggcgcttgctttatcagcagccagcaacccccatgccagttgctcatatcggatgagatactcaatgactttgctcaaggcaatccttctaacttacatgtattgcaggcacggtgagtaagaatttgtcttgattggaatgcgcgtcaatgtaaacacctaccatttgactcggccctggcgtacggtaactcaccttacccagcttagacccaagattcgctgagattggtccgtgctcacggcccggcggcaagctccaacgacactgaatacatgcatctatctcacgctcgacaaacgtatggtttctgtgtgcaagtaaataccttgcacgtaaaccaaagccctttgagatgagtcgtttgagactctgagccatatagccatgacaccaccattctccctcgtggccaaaccctcgctccgctgcatgcgtaaagagctcccgctgttcagacaaacttatgacacaagcggtctggatctccgtctgatatcctcctcgatcatgtgcgataactatcacaagcgtgaagcatagcggaatatggtgccaacatgcccctgtccatagttctctggaacaagtatatagtcgtgcactaccccccaaagcttcgttggctcctctccaggaacttgcagcagagattcaaatctaaactcacaaaatgttgcctatcgtcacctacctcgtcagcatgctggcactgatcagcaccgtgtacagcacccccgcggttgtcaacaactcactctcccttcacaacacctcattcctcgctgcttatgacgactcggggtatatcctggaatggatctgcgatcatgatacctcgccagcccaccaaaactccatccgggacgaaattgattacctacgttcgttgccagagacacccagaccacggacgacgcaaaagggttgtggtcgcgtaagctgctcttggagaagcgcaattacttggtgtaacgaggtaggttcaaaccgccagagagtcatcctcggggaccttctacattctactgacatccaaccaccacagaacttcaacactggtatcgagactacgtgggagcacattgccgcaggtgcagagagtctgctcacgaagtgctcttacaacgacggtcgcggggtgaatggagtggcgcgttatagcacaaactagtttgtgaaagtttgggtcaacggctgttgatggcgggttgttgaagtcagtcgtggcgagggagcatagaaggtttgtcgtaaatttgcgactcactatacccgcactggttgccgggctgcgttcttgagtatggcaaacagatgatgtgatatagatgtcggccgtgaagttgtaaagagagatgatcaataaagtgcccttctacggttgctgtggcccaaaccaaaataacccgtcctccggccattgtctccgaatctcggccgcaacatttgtgttcaagttgctgctcttccgtgaacaatgatgtagtcttcatttgctttgatatcttgcttctctcggccgaagggcccatgcttatcaaacgtttgttcgtcaaggagcaacaagatttccgcccgatgtcttctccgcggttcagcagcggcagctgtccaaggtggcagcagcgggatgctcctgccagccgtgcccctaaccagtatctatatccatggtttcccccagcattcggtccttcccctcctttccaaaccatcaaacacacactcaccatttgcacaatgatatccatcctcaccatcgccgccagcgcgctggccttctcaagtgtggcctacagcgcccccgctgaactcgccccctccaatggcactgccacggtctcaaactacactgtatactacgagtgtaacccatccaacctgaagtgggccgaaatcaagaacatccagatcggccgcgattatctaaacgggctcccgggcaaggctaaaatcgccggaggcaagcactgcgaccgcgtcagctgctcgtataactcggccattttctactgcaacgacgtgggtgatcctgctgttttcggtttattgcttctcttcaaagctgacgctgattgtgacaggatgataacgagaaggaggtcgagtgggagaggctcgccgaattcacctcactgcttcttgacaagtgtggtgataagagcgtggtgaagggcagggtgttcgacaggcctaactggcatactgaggttcagggtgaagcttgctaagggcggctgggtgaagtagttgggtgttaagtaacacagggacgagcatagagttgtagtttcgcgcggagccgcgactgaaggcatttgcgctggtttagcacggtttcttcaaagttgtattttattacaagaactgtgattgtccatttcgtgtcgtggtttcttccccatcgagaattaccaacttgcctggtgtccagggagcagcggacgtaatcggcgtctcatactgactccggatatattccagtatccgactatctgctcatggagtgacggacgtcgagttactagctcaactttctcgttaccttctataaatttttccctattgtagaagaaactgtcgaagtttcgcccgaaataatcaccaaatccaggcccccacttcaggtcttctcatggagcaggtcatcatcctttccttgattcacttgaacacggtctctgtgagataccacatctaggagtcggccgtaaaccatgcaagtgaaaacaatcagttgtctaccaccttggaagagcaaccacaacgacagtatagagcatgaacagcacaagaagtggggccagaagttgacagagggcagtgaatgatagcaactgtctaccttgatccttgtattctgtatatatacctaaatcaccggtaagttgacgaactcttctccttctctacacgccacccaacccaaccgacttacagttgcttccgacacacagcttacaccatattggctgttctcacccttatcaccagcatgctggccgtgacctacagcgtcccatctttccacgacatcacctctctccacaacagcacctcgctccacaacagcaccttgctccacaacagcacctcgctccacaacagcacttccttagacaacagctcggctccgacttttggcaacaacaatatctatcccaagagctccagatattatacatgcaaaatggagggcaacggagccccgatcaacgagatcggccacggaatcgaatacctctatgacctgcagcccagcctagcgaggattggcgagggcagacactgcgaccacgtcagctgcgagtgggggtaggccatctttttctgcaatgatgatgtaggttcatgtcgcgaatggccaggttgacgttgttgagatctgttgctgatatgagtttatcttagacgaaccgcgtcaaggtagttgaatggcctcagattgccgatgccgcttcgctcctcatcgacacatgcagggatacttctgaggtgattgtgaagggcaaggtgtacttcacgaagtaactggcatgttgaggttgtcggaagtgtcagtaattgctgaatgggttggttgggattcacgatgctggagcaggtggtttaaggttgaggatgtggctgataatacatgggcactggttactggattgttcttctgtctttgtctgctctgctgtagtgatgctcagtaaatgtggtgacgattaagggggccccactataaaagtataagccaggggcggcccactcccaagggagggtccgtgtcgacgcgccaacatgatccgggctgtcccaagaaacttgacggcgccgcatttggtcgaccccaaagcgaacctggtttctgggtcagataacgtgtcatatcattcccagtttttatcctcgagcattcttgttgcagtatcttcacaattgggccatcaacggttctcagaatgtcagactgatcatgacagtggccgccaatcagcatggacgatccatggcgctcaccatggactgcgaccgacgtcgaccccgacaaagaccacaagcttccctctccctctctctccaaatccgacctcgctcctccaccgcgcgcgcttctctcgggcaccagctctccacgactctcggcggcagtcgaatcttcgccatggggcgatgacggggatggcctcggggactgggccggcgcttcgacaccggcggccgatgcctcgtcgattcattcgggatggggcggtgggtgggcaacgagtccgaatcttgcggccgttcgacgagacgatgattctggcaggttaagcccaatcgcgtggcctggcaacattgcgacgccaaaaccagcaaacggctccgcctttcgacaaccctcgcccgatccctgggcaaccgagtcttcgttcgacaaaccgccaacggaaatcgacgcaccccaagtaatcgtcgatcttgcctctcctcgagcgacgcactttgagacgctgaaagccacaaccggtttgggggcgattggcctggatgctggatgggatagtgcctcggtggaagagaacagagaaggaccgaccgaggtcacggatccccagaatcatgaagaaaagcgagcagaggatccggcacagcttccgcggcacaatggcgagtttcgctcgtacactccgtcgaacgaaggaacagatcacgacgatgatcatcaagactcacccataacgtccatcgacgaagaccacagaggccgtcaacgagaaccggcccggcctgctggtaaggtccaggagctggtcgtcaagtttgatggtcttgccaaggctaggagccaggagagcttgcgtgtccctcggccgaagagcagcggcagtggcagtgtgggcaaacgggatacctcgagtgacaatggtgattttggtgacttcgaggatacagaggacgtcaaatcccacccacccccagatcccgtggaacaacccgtggcacctcagagttcggaagacgcggaacgacctgtcacacctccctcatcgcaagacgtaaagtcaccactcactcctccttcatcaaagtcaaaatgtgaagacgaaactcccacaaagcgatctccccaggtaaagtccagtgccgttgcttcccccgaagttcctatcagaccgaaaatcgtccgtccgacctttgaagtcaatttggaccaagttggtgaacttttcgagtcgatgaaagttcctgttaaactgcctatcatcagtattgatggtgagattccggagcgtgtcatcaccgacagcttcaacgagatatctgaacgaaagctgtggtaccgtttgtctcggttgggatcggcgaggagacacgatgctgcagatgaagacagctacagacggatcacttggccgacgtccacagttcgtcaggaagtcattacaatcgtccgccggtggatggaagaagactccattgctggccgagtggctcttggcggaggcatatccaagactcagaagaatatgttcggctgggattcctctgccgagcctgttggtctggatgctgtctttggcaagcgaaaacaggaatctagggcagctccaccacagccgatccagatctcagattccctggcgtcttttcttgaaccaccaactcctacgacgtctagatcagcccacagtgtcgcatcacccccaccagctgtacaaagcccgccggttgcttccttcgggtggagtgagagccctgcatttgctcccacgccaactacaacccttgcaccaaccccacgaccatcaacaggcgggagcgcgccctcagccttaccgtcaacagcaggtcattcacgaaccgcctcgcagccggcagtgttcggtactccaacagcattttcacctgcgccaatagccgaagcaaaccatgacgatggagaagacgatgatgaagactggggtgaaatggtctcttcaccagttgagtcaaagccggctggattccagagcttggatgatgcctttgcggccccaattgctcctactacctcagcatctacactgtcagaccctgaagcggctggtgaaactagaccttctgcgagcgacccatggtcaacaatggacttttcgatgtttgacgctccagctccggttttgtctcagtccaaagcgccagccgctctaccgacgccttcagatacacctctcgccttctcgcccatagttgtgacatttccgctgtctctttcagaaacgcccacaccttcaccgacattcacgccaccaacacaaacttcaccacctccaccaaaggcacttctcagcgcacgaccttttacaccatcagtgccatcgcggctgtcagagcacatgtccgtgccaccagatcctgttccccccatccaggattccatccacgatctgactacgagtgacgatgaggtggctaaacagatcatcgcaaacctccccgacctgtcatacatgttgcgatgatacatcgagaagacggcactcatttgcaaataataatgtatgtatgtacctaggcatcaagccaactgtggctggttctgttcatgagtataatgcatggttttggcgttttggattttgcgcaaaacacccggaaatagctggtatttttcggctggtgagatgtcaagagtatatataccgagcatggagtttttaatagcaattcaaatccttgatcttcacatgctcatgacttttaccagggcagttcctatcccaagcgctagaatacttttcctcagaaaaatatcgcagtttcccattgtgcggtagcgtcgcgtattcgccctttttcatgcatcttttgcatggatatccaccctcggaaatctgttcccttagctggaagagggccagcctaccagaatgcgttcggagtcgcgagaagtgcgcgaacaaccccggctgttggtcaacttggcttcttcaagctcctctcccccgccttgctccccccagacacccccaggtcccccccaccaccgttcacccgttacaggggacgcagtggcgtctccccgcactcttgggaggttgatccccgtcagccaagacggccaagcactaccccagacttttagccatctggggctgttacgtatcagaacctgaagatttccaaagccgaagctgatacccggtcacacccacttgggggctcgcccttcgcatgtggtaggaccccaggatatcgatgccatcatggatgttgggtctttgcaccgaaagcccgactggaggctctgcggcccctctgcgccggctcttggttgacagctgggactaggccgtgggaatggagtggagatatcaaaccgctagcttaacttggatatcgctcgcgtttccgagatgttgggttttcaaagtcatataagctatgattgggaagtcttttcggtgattgtttgggcagagaactcagtcttcatctcacctgtcatacacacacaagagagatggctgtcgtcaccctcctcatgtcgccttgggcgccagtaggcctggttgccttctttttcgtctattatctctacccatacttcttcacataccgtcacctcagacgtatcccagcaccattcccggcccagttcaccaactggtggttacttcttgttgcccgtcgtggcgaccggtacttgaccgttgatcaacttcacaagaagcatggcactgttgtccgcatccaacccaaccacgtcagcatcaacgatgacgccgccatcaacatcatctacggtcacggcaatggtttcctcaagtcgtaagtctttgccctcttgcttgcactcacagagacagaacatcactgacatctatcacacagcgacttctatgacgccttcgtctccattcgccggggtctcttcaacacccgcgaccgtcacgagcacacccgcaagcgcaagatcgtctcccacaccttctcggtcaagtcggtcgcccagttcgagccctacattcactccaacctcgagctctttgtcaagcaactcgacaacctcgtcacccgctcccccatgaagactgccgttctcgactgcctcaactggttcaactacctcgccttcgacgtcatcggtgatctcgcctttggtgcccccttcggcatgctcagctccggcgccgacatggccgaagtccgctcttccccagacagtcccccgatctacgcctccgccatcgagatcctcaaccgccggggtgaggtctccgccgctctgggtatcctcccatccctgaagccttacgcaaagtacttccccgacccgttcttcacccagggtctcgccgcggtggagagcctggctggtatcgctatcgcccgtgtgaagatgagacttgagaacccaccccccgagggccgcaaggacctcctccagagacttgtcgatgccagagacgaaaagggtgaaccgcttggaagggaggaactcaccgccgaggccttgactcagctcatcgccgggtcagacaccacctccaactcctcctgcgcgcttctgtaccacgccgtccgcaccccgggcgtgatccccaagctccaagctgaactcgacgccgctatcccccactcgatcgacgtccccacgtttgaaatggtccgcgacctgccttacctctccgctgttgtcaacgagaccctcaggcataactcgacctctgggattggcctccctcgtcaaatcccgcttgactcccctggcattcacctcaacgggcacttcttccccggtggcactgttttgtcggtgccgacgtattcggttcatcattcaaaggagatttggggcgaggacgccgatcagttcaacccggataggtggtttagcttgacgcaacggcagaagaatgcttttattccttttagtcatgggccgagggcgtgtgtggggaggaatgtggccgagatggagatgaagttgattgtggctacttgggcgaggaggtatgaggttgagctgaggcaggaggtgatggagacgaaggaggggtttttgaggaagccgctggggttggaggttgcgttgaagcttaggaaggggttcacgcctttggcttaaggggtggggggtaagaaaggggaatgtacgattattgaaaggggggaaatgcgaatagtatatgatgacatgaaataaatgttcaagttcaaatttttgatgggccgttgcggggtgttggtgagtaggtgagtgagtgagtaagtgagtgagtgagtgagtgccttcacaactttcactcggatgactactcgttgccgaatgcccggtatctccgatttacatcaactctcccaagcaaagtcgcaaggttagtttcgccatttggacagttttgttcggcctgctgatgatggtgcattgacttggccgagtcgcaaccgaagatgcgtgggtagtcgccatcgtgcgtgccgaaaacgccaaatttggggggtggccagacgacttataagtgactagtgatggccgcaagaacatatacaatttcaaagaatcctttctgttctgagtatcctgtgtgaaccacctgatataattccgatacatctcgattaaccatgaccagagcagacaaactcgccggcaagaagattgccgtcatcggtggttcatccgggtaggtacctacctacctcgcaccacaccccctttgtctaccctcactaacaaatcccccaaccagcatcggctacggagcagcagagatcctcctctccgccggcgcccacataaccatcatatcctccacccaagaaaaagtcgaccgtgccgtttcccaactatcatctaccgctgggggcaacgtccaaggcagagtcggcaacgtccgcgacgaagccgccttcactgaactgcttctctcccttgcccccctggatcatgtcatcttctccagcgtcgataaaattatccgtggtagcctggccgaagctaacctctccgacgcggcggggttgttcggggtgaagttttgggggagctttgttgtcgcaaagggtgagctgacctacctttttcctcttctagatgaaccatgtgctgattgaggtgaagccatcgcaaaacacgacatcatcctccctggcggctcactcaccctcacttctggcgctgctgctctacgtcctaaaaagggagcgacgattgggggggcgctgaatggggggttgattaccgctactatttctcttgctgatgagctttcggggaagaggatcagggtgaatactgttgtcccggggttagtcaagacaccgcttttggggaagttggggaatagtgaggagcagcagagggagatttatgagcaggcggccgggaggttgagtgtggggtttgttgctagtccggaagatgttgcggaggcgtatctttatgctgtgagggcggattatgctaatgggtcgacgattgttattggtgagttccactacctattgaattggtttgaaatgtcagagggggtttctaatggttttgtgatacagatggcggtagttctttttgattgggggtagaagtggatggggatgcacaatttgggagtcctggggagtatctcaaaaccgagaccaagatgcaagggcttgatagtgtgggacatgtcagaaacgatgctcaaggattgtcagcggctgggtagtgtcagaaatgactacggaaacaaaaacatgccagctgtattgtccagtttaagggacccaactaatgtgagatgacaccaaatttgtcgatggtgaaccacaaaggtaggataggtatccaacaatcactgcaaccgtcgtattcctcatcagtgagccctccctgaccagaacatttgtcctcgttgccagtgttctcggctggtttctggcactcctgatcatgttcttaatcttgatgcttgtcgacagcctcccgcttgccatcttcgcatcccgtgcggtatccctcttcatgaccctcagaatgtccctcgccataatcttccttagcatcgttgtgaacctaatccgaatcgtcctaaccatacagatagatatcgtccaaatcttcgtcccaacctttgtcgtcctccatctcatccttcttcttgtcctccccctcagaggacggcgcgcagcactcgatgttctcaaagggcctgtagacttcacgctcagcaccacacagtgctgcagcacaaagaaccacccattgcacttccagcgcaactctcgtcttgtgcgcatcttccataagggtctgaaatttgatcagagaactcgaggtagggggtccacctggggcactggccttgcaatcaggcatctaatccagaagctcccgaattggccccccgttaccagactcgagtcgaacgcgcaggaaacggactggctgttcccgagtatttggatcagcctttagctgtctgcgcatgttcttcgtgctgactgcctctgggagccactgaaaccgggtgacgatggtggctagcccgcgtgtatgatggggctcaaaacggagaaagcgcagaacaaagcggacttctttccacaacgcggccaccatgggattgagacagatcaaattccatgtcccgttaggtgattcccatgggtcaggcgcagcgattgggttaaagtcagcccctggaatgctactatctacccgcactttccggcagtggatggtaaaagatatggtggacttggtgacttgccatccttgtgatgacacgcttgttgtcgtcaaatttccttcactggaagttctgcatcgcatgctggtcaaagctgaaggaggaatcccaaagaatctgcaccgtttaaaagtactctcgtcagtctctaccctatcttagattcaaacgacctgcccggtgttagttgataggtaggtgactatgactgggtgcagccacagtctggcgcttcacacagaattcaaataagattcaaacgcaaacagaacttgctttcactcccacccctcacgaaatccctacccagcctcaactccaaacgttaaccacccacgacagaactccatttaaacaaccctcctcgtcttcccactctcaacctcataaacccacccactaatcgtcacgctatcaggcacaagcttgctcgccttcagaaaagccacatcgtcctcaaccgccttctccagctcggggaaaggcaaaaagtcaaggttcttggccttgagttcagccacggcttcctcactgttttacatgttagcctctctcacaaccacctaaaatccgtaaacctacccaagattcttctcaacaatcccataagcatcctcattcttgaacgtcagcatcccacagccagtgtgcttgacaaggacgatctcgttcgtgccgaggagctgctccgagatgacgatggagcggagggcgtcgaccgcgctggcgccggccttttcattttcttagtctgatgttcagtctcaaagagggagtgaactcacattgcggataacatgcgcatcaccaagctcaatcccaaacgccctcgcagggtcaattctcgcgtccatgcaagtcaaaacaagatatttcttcgccgggggcagagccaagtgcccttgggtaaaagaggcagagtacgactcggaggtctgctcgacgttcttttggatggcggacatggtcactatctgtggttgataaagatctgtaggtgggaagaagtgaggtgagcaaactcaggcttggaaaaccaaaaacatcaagacaaaacaacaacagcaacaacaacgagagtaaaactactctttgcaatatgatagagaatgaaaaagagaaaattagaaacaatagcagcactctctcctctcccccttatatacttgactcgaaaaaataacataccaaggcaatcccggatttaggcacggacgaacaaaaacacactgtcgattaaaaccaccaacaacaacaaaaatacggttatgaaatccttcctcgctgtatggcggcggcgaatttgtgtcaaatcatcagatcaggaataataaaccgggggaaacaaccaaaattataacatctcaagtcacacagttccccccctcatctcatcaacctcccttcaagcgagaatccccgccaagacaaagctgaagcagccttggcacctccgccaagtgggagttggagctgtttccggcaaggtcagccatgtcgtccacaaataaatggagaccaaaacataaaagaagagccttgatgagatagtgaaaggccttcatcttgtgtagctgggtccattattttgtccgccatgtgtcagcggagctatcacccccatgacgtgctcagcaccccccaaatccaccgatcaaatcccacgatgtttgagattcctcatggttccgtcccaatcactcgtgcagaaacacctggtacatcattgcatcaagcagccacaacctctcgccatcaagatgatcggcgctttgcatatcccctctcccccacctctggtcaggttagcaatatcgccgatagtatacaatagatagggcgcaataaaagtacacgctgtcgttggatatatttacaacggtattaacaagttaccatgtcagaatgaaggactcattcctcctggcccctcgcccttttcctattcctcctcgccaacagcctttccttctcctccagagccctcttcgcctcatactcctgcgccttggcaaacgtagccttgtgagtagagttatcctgccattgctcaagcttctgctgcgcagccgccttggtcgacttcaagctctcaaaaagggtctccttttgtggcaccacggtccccttggtatccagagttctcggggcctggtacgctccgccaataggggacctatggtggcccccaaagaccactggtctcaaaccgatcatcttgcggaaccagttctgatacgtgagccactgctgcccaaactgcaggaaagtagagatcgcaaagtagagttggagaccggcgggcaagaaaatgctcacaccgagggtgattggcgctgcgaccatggtcatgatcttcatggttccttgctgcgaggaggccatgtacgggagtggtacctagatagatcacaacaattagctcagcatcatctgacaaaaaaaaaaccaaaaaaaaaaccagagctgtggtaacaacataccctcatactagcaatcatcaacccagcacccacaatcggcaaaataaacaacggatccgacacggtcaaatcattaaaccacaacgccccacccgtctccatcgacggcaccggcaaatcagccattcccctgatcaacctaaacatcccaaagcccacgggaatctgcaccaaggccggaacactcgcaggcagcatcttgtaccccaccgcccgtctcatcgccttcatcttattcctcttatccaacatggcatactgatccgcctggcccccctgaaaagccgacatgacctccttctccagctgctcatacttgggatccctcttcagatcctgcagcttctgcgccatttccgcagccgtaaacataggcttgacaagaaccgccctgatggcaagcgagacaagaccgatcgacgcccaccacgggaggcccgtgtagatgtacgtgtgctcgaggatccattccatgagggctgtcgggccgaagccgtagtctagacccaagttcttgagaaagccgatttgctcaggcatgttgaggaggtcgcttccggagagggatacgggggtggtgtcgatatccgacaggacagaagggctcgcgatcggatctaccactggagcagcggcagcggcgggggcgggggttggggcgacggccggttgagtcgaggcataccgcacggctgtgaaggcagcgggaccacctatcctgctcccagagaggacggtgcgaggagtctgaggaagggatccattgctgcgcagagcggtgccgaactgtcgtgttgagattcgggaggacgacgactggggaagttccaaatgtcagcggtggatatgggaagaggaaaacggaaacggctcaattgagtcgagaggtcgctaagaaacaaggaaaaagaaattggaaaaatgcatacctttctggcaaggcccaacgaaggggttgacctcagtatacctctacttgggagcattttgtctcggtggtttccgcaacgaggcagactccagaatcgccttctaaaagtcgctgtaacttttttttttggtacgtttcgctggcgcacgcggcaaaggttcggttggtgccccccctggtcgcactgaccccacaattgatcaacaccggacggcgcattgccaaggccagagcatgtcctaagagaaaccgtgcagaagctggaaggcatcaacccttctagggaacaagccagaaatgtgggatggggattctgagactcttcatggttggatttttggactagctgttatagtgactgtccccgtatgtctgtatttaaaatgctcaacggtagcaccctcctcgccttttgccctgagtcgagtgtgatatgttgtttggtcaccatatagttccagtttggatctctcacgctgtccagcaccagtgttcatgcccatcggctccaccgaggcggtgggcgctctaagctgatagtaacctattctgtcgtgtgttggtgtatcatgactttattgctagcaaatcgacaaccctcaacatcactccaagctcgtcaggtcgtcaagttccctccgcctcggcttctcgaccgcttcgatacctggcccaatcggatgcgcttgtcttctagtaagagggaatatctatcaaaaaaaataccatgtcagcaatatccttccaacaagcacaggatcaggcttaaatgtagcatacccttgtgttgctccatcccaacctgaaagccgcctcatgagcaaacagctcgccaaacccaagcatcatgccattaacgaaaggaagaaacaggttgatggcagcaccgcggaggatagaccagaaggtggggggctggtagaggatgacggcgggggacgacgacgagggtggtgacgtagacagctcctctggggaggaatactgctcgctgtcggagcggatcgtgacaccggactcggccatggggtttgggggttcttcagaagccatgttggtgtggatttggggttgagtgaatccggctgagatttgggtagccggcgacgatgggacaggaacactatgccgacgtccggagatgcagcgaagcactggacgtcgcaaaacgcttgggcagccgacaggggagcccggagtgcctgccggagctagctgcgtttggttagggaatcggtggtcgggggccagataatccggcttggctgatgtatgaggtgtcgaccgtaggtgttcaagctttctttctcgagtgcaagatgctcagtttgaaaacattttcttatagaagcaatataaagcaagtaaatcgcttctataccagacatttggtcgatttaagggctcattttcatcatggagctaggcaactgtggttgacagctgagtacctaccttggacgtcggcggggtcaagcaacctggatggcggatggcggatggcggggcaatcagacgcctggccgtgcgtcgttcgtcacgtcggccttgagctgcctgatggccatccactctccaacttccccaaactgtcaaactaataagccttccgagctgtatcaacgacacaacaacttctgattccatcgactccgactttccaagggacgatagctgtctgcttatttcaatccatccatatcacgcattcaaccgaatcacgttcatcatggcggatcaagaccatgacacgctgatcagcaacttctgcgacttgacaggcgcctcggccgaccaagtatgtgatattctcaacacggcatacctcgtagcaagatcctaatgttcgacgctttctaggccacagaatacttgacagcgaccaattgggatgtcaacaccgccgccgccgccttctacggcgatcttgacgaaaacgagcaaggcccctcttccaccggcgccgccactgccaccactaccgacgccgagtacaccggtccacgaacattggatggccgaccggcacctgagtatgctggtacatcctcttcgacctcaaagaagcccgtcaagcgtcgcggcctcgcgactctgagctccataggcggcggtcgcaaccaagaagacgacgatgacgacgatgacgagagcgatgacgacaatcgccggggacccagggatttgttcgcaggcggcgagaagtcgggacttgctgttcaagatcctgctcagcggtccagcgatccgagaaaattgatcaacgatatcgttgccaaagccagagcgtaagtgttgccactctctgtcgttgggtcgccagatctaattgctaacttctttctcaaacagcaatgccaccgagagtaatcccgcatcttcccccgctgcaggcccctcatcgagtcgcttcagtggctccggtcagacattgggcggagatggcgtagagagtcgcactattcctagctccagagctgctggggccgttcccgaggggcctgcgcaggagcggattctccatatctggcgtgacggctttagcattgatgatggggagcttcgtcgttttgacgaccctcagaacaggagcgacttggatatgatccgcaatggacgggcgccaatccatctcatgaatgtccgcatggaccaacgggtcgatgtcaagctccaacaacacgacgagaactaccgccctctgcccaagatctaccgacccttcggcggtgagggccgtcgattgggtagccctgtgcccggtgaggtaacaccaaccctctcccctccggccgcgactacgacacagcctcaggccagccaggccctgagcaccggagtggatgagtcgcagccgaccttgatgctgcgcattcagcttcccgacggaacccgcatgccagcccgattcaaccccacgcagacagtcggcgatgtctacaacttcattggacgctcgtcttcctcgctttcagcccgtccgtgggttctctccaccacattccccaacaaggaccacgaagacaagggcttggtgttgggtgacatgcccgagtttaagaagggtggtgctgctgtcgtcaagtggaaataggcctatttccagcattgatgacaagcgccaggaacaatttggcttcatagtatcggcgttttgatggtttggcggcactagaccaagcgatggacaacagtgtatctgtcggtttttcgtcccgagagctgtgtccagctttgagaccggctggtcttttcagcaggggaaagatcaaataaaaagtaaaacctgctcataattacatgctgccttgtgtttatttgcccaaccattttgaacacctttgacgccgctgctgtggtactatcccaacccgtgatgtttgcacgggctttctctttttccaccaccagaaatacaacaccaaaaaaaaaagaaaacactagatagtttttccatcactgaacatgccttttcttcaactgtttggatgagccatcccatgctctcacgctcctgggtaataactccccgcaacagccctatacggactctgctgtaccgcccccccgcccggagcagcagcagcgggagcagcagcagcgggagcagcagcagcgggagcagcagcagcgggagcagcagcagcgggagcagcagcagcgggagcagccgcccccgggcctggcccatccaaaaacctgaaccacgaccttgctgccgtcacattcaactttgcgctgttgaacctcgcctcccccggcggcatgcacaccaagatgtacgtgttggcagtaaacttggtgacaaacatgctaaagtggctccccatcttgtactcaagctcggagaactgctcggcgttgcgcggcgtgcccgtgaacttgctgcaggtgtgcttccacgacttgaggatattcgacatgcgctcgaagcggtcgccataggggttcttattcccctcgtgggaggcccactttgacacgacaagaaacgaagtccgctcgaacaggaggatctcgtcggcttcgatggcgacgccgagggaggcgagctgggcttcgatgacggccaggttcgggacgaggtcgtggatgatggacgcccaggccttgtagagggactggtcccagatggaggttgcaaagagctgcatttctggttcgaggtcgtcggctgggtgggtaggggtgagggtggttggggagggggagtgttgggcgagggagccttttctgattatcgcgactgcctccgaggtttttttccggacgacggcggctcgttggacgaagacttcttctctcatttggggggggatgaggtccattttgtggattaggacaaagatttgggcttcgcgggagtattggaccagtgccgagatgatgttgacgtaggttgcgaggtcgcgctctacgtctcgggattcaatgtcgaagatgtagatgaggacgccgacgttggagaagacgtgggcgcgctgctgggaaaggtagttttccataaaggcttcttgtccgccgcagtcccagaggttgagggtgaggttgccgaggaatttgacgtgggagaggtcgatgtctattgttgcgcctctatttttgggtcagtaattcatgtcttgggtgagagtgacaggggggaagagaacatacaatcggcgggtatcgcgggcgaggtaattggagaagatgatgcttctcatactggattttccggagccgcttttgcccatgaggaggaccttttgcttcttgacttttttgagctgagtttgtgtttttggaattccccctccccctgatgagccatctgtcacccccgcggtgccaccgctccctgttgtcgtctccaggcctgacattgtgtttgttgggtgtgctacctcatgtgtgatattggtgtatgggttgctgagcaagtccagccctgactaattaagatgatgtgaatgattgaagcggtcgcgatgagtgaagtggttgttggtgagagcaggcatggatgagcggctgggtacgggagctgattgaggatccacctggggagcgggtcgacagggatcatcggtacaactgagctaactgtaaggggtttggcggtgtggatgagcaacgggagcttagcctcacgtgacgaaatacgtcactgcttatttttgcttagctcacgacgttgcgattcttcagccttcacttgtctcatgggagcgaactcggagcctgtatcatatttgactctttgagctaatgtcaggtacttcatgaaaagggtggatgaaatgaccagctgttttggatcaggcaaagccacactctggcatcaatcgaccattcaagcaggcagctgtccaggtactgtccaagtaggtttttcatgtctcaactgtcttcaccatctgaatcgtctttcaatctttttacgagaatcttaatctactcacttcttgcctgctcgacaaagctggtagagtctagaccaagcagtgtgaacgagcattccaggtgttgccgagcaacctgccccctttgcccctttcatgccattccttcaactcagcctcctcacttggacatgccagttgccaggatggcgaaaatcaaacagtttcaaatacagacctggagtcaagctttcagtcaccgtgttggttcccgtgatatgtattgctgtcatcctgtttcgactagagtgaagggacagagcataaaggcaacccagtcttgtatgcaatcgaaccttccgttgaactgaagatattcaccccgcaacaccgacttcagtaaatagcactagcgttcacgttgtttgtgtctcttgggtgtcggcgactttgcagtgaattaccagttccaccaacacgccgattcactccaacaatttggctctgttgtctgccgcaactatataaacgatttctcatcttcaacggcctcttctcttcctcttcctcttaccagtgtcgatatacgagcaatattaacgactcgacttcgaacctaaccagcaatctactcacacacattctctggagatactcaaacccacctctccacactttcaccaacaaacatccaccctcaccatcaaacaccatgatgccccagctcctctacccaggcctcaccagcctcctcttcctcctctttgcccttcagatctcagcccacatgatgatctcctcaccaccacccctcggctcatcaagcaaccccaacctccgctcttccgatattgattacaacctgaaggaccccctctccccatccggcctaacctacccctgcggcccaaatttcgacctctactccctctccccacaaggcaaccccgtcgcaacttgggcggctggttccagccaatccttcaccctggacggcggcgcctcccacaacggcggttcctgccaggcctccctctccatcgacggtggtaaatcgttcaaagtccttcgcagctacgaaggcggctgtccactcaaaaggaactaccagttcagcatcccagctgacgttccggcaacaaagaaagcggtctttgcgtggacctggttcaaccagattgggaatagggagatgtacatgaactgcgccgttgtcgacatcacacccgggtcaggcggaaaaggcggatgggccaagaagccagaggtgttcaaggcaaatattgggaacgggtgtaccacggtcgagagattcgacgtcgagtttcccaacccgggggatgatgttgctaggggtggggaagggaattttgcgagcccggtgggggattgtgggacggtgaatcggggggcggactcaggtgcgggagaaggcagtggtaatacccagggcggcggtaccgatagtggaaacggaggtgctaaccagaacccagactcgccgccagcaggggattcgcctggctctagcacaactgatccgactaggccatctcagcccaactcaggaggtaagtcaacatctctcttcaccatctcaccaccccccgattctgtttcctaccgtcaaaaacgagttgaagccaattctccctttcttattctcttttctttctagatgatccagactcaagctacgtcccctccatcgacgactggaagccagggagggatttcccagagtggttcaacaagaactctgggatgtctatcatagtctcttttccttcagtctttatggctttgacgctttctttcctctttcatatgtaagctttgatcgggtaatcttttcttttcctctgtttgagacattgactaacactctttcgaaatcttattagcggtacctactacctctgcttgtggcacaaaaaccgtcaccgcgaagccagaggggacaatggtcttcacgcggacattcaccgtcacttggtgaggagatattggtgggacatcaggttagggccagcgaaattggacatgtagttaagacacaaaatttgggatggtttggtggtaataaatactggtatttcaaaaagatgaacaattcttttctcagaattgtactaaactataaatattcgtaattcataatcataaaatgcaaacgctacgttacagtcgtaagacccattccaccttctgactttaccctttgcgcccgcaaaacacaagatcataagacgctcccataaacagcaacaataacctctttcaggacactacgccaacaacctctgtgcctgtccctgtccctgcccagccatccccccctcctgcttccacctcctcaactcctccaagttaacctgcccaataatattccccctctgtgtcctcaactccgtcatcttcaactcatgcctccccctggccccctccccatcaatctgattcctcaccgcatacgcattcaagttcgcctccctctgcctctgactaaactccgcctcctgcaacttcctctgactctgaaactgcaactgttgatagttaaagttttccttctcttcccacctctgcctatgcaaatcctgcatctgcgccaaactctttgcatgtctcagctccttgtgctctagcgcgacagtgttcttctgtctgcgctcttcaatatgctgcacatgggcccgttggcgatgagccaaagacgcactccgtttctggtccgccatggcgagattatcgttatgtttctgccatcggacccccgattgaacattcgcctcactgatcttgatctgcgagtcgttctgatgtcgatctgccttgaggaaagttgcctgctggtggttcaagctgcgttccttgcgcccctgttgggagtgttcctccttgtatcgcacgctgcggctgtgcttttgctcctcaatctgggcgtgcaccgtcgccttttccgtcacccgtctcagctcattaccgtgactttcctccacacgacgattgcgctgctcccaggctcgtcgctcccgctcataatcgcgaatctcttctgggaggccaacagcatcagctggctgcgtctcttcgatggtggcatagaacctgtcctcaacaccgtggtcctgaagcatttgtaccaaggccggcgagcgcgggccaaggaggatccctttcatgatgtacatcgtcggagaatagtgatagatgccctcctggaacgtattctcgtgactgttgagggtcttgtaaagcagtcgatcgagcagaactcgcgtgatggcctcgttgttctgattatccagggcaaggaatatgacagttttgccgcgcaccttgagcagagggctggcatcgacagaggcgagaatgtcaagactttcatccgcaagggcaatgtcatgcggcattgttgccttgagagcaacctcgcccagtgcagttcggccgccatgcttcgtggaacgataattgacatcgtgaccagcatcgagaagcaacttcatcgcttcagggtgaaagttgcgagccgcctcatggagactcccgtcattaacagaagggttatgttgaagcagcgtcttcatcatgtcgatgtcccctgcgcgagacgcgaagaagagcggcgaccgaccaaggttatccttcacgctgaccttggccccgtagctgaggagcatctccacaacatcaactctcccagatttgacagccacgagaaagggcgtggttttcgagaccggggtggtgtatgaaagatcggctaattccgttagaatgtctttgttgtcacaagaggcgagatacttacatccatggcagatgagagcttcaataacatctttgctaatcatctcatccttttgcaacagtgcccacatcagcacagtgacaggctcaagctcggcctgagcacccttttctgtgtcacaaacggcccaaacagtagactccagacgacatccagccctcaccagacgatggacaatcgcaaccgagtctccataagacttgagaatgagaatgatcggcgggtgcggcatgccgggaagggaatgattgaagtcggtaggcaaacctggttgagccatgacgttgagaatttggagaagaacagactcagagtggtgagccatgatggcggcagaaagagccagtgttgcggaagtggcatcagctttttgcttcaacaagtaatcgaggaggagagggtcgccccttgatgccgccgtgccaacagcctttccgttttcgcagtttacgtcggctcccgcggcaaagagactgtccagaaaggcccttgacaaagtagcttgatcattgtcacaagcgagctggtccaccacgtccatcatcgccctgctggcaatctggggggaagcgccatgtttcaaaataattctgatagtgtcgacatgttcaaacgcaatccactgcttgcctcggctgagaatagcggcaaaggcctgtgtaaaaagctccggaaccttcccagcgtaccctgccaatagatgcaacaggtcacgttcaagattacaagccgcgttcttgatacacacgccattgtcatgagttggctctgccccagagtcaagtagcgttttagcgagtgccaaatccggttttggttccaaaaccacatgtttgagcgccatattgagatgatcaagctgaagccgactcatgacctcacccaacaccgccctcctatccgttcttggggcacggagcgcctccatgagtagcgtgaacaaggccttgtaactgataccttgacctagaaccaagtgaaaggtctcggggcgaaagcttcggattgcgtaaataaagacctctccattgttgtagtttaccgatgcacgtgtgagaagtagttgtatcaactccctgggctgatgttagtcacgcttcatcaacagggaactgctgtcacaacttacgtattgccaaagtcgttcttgaacacttccaccaacgctttcccactggcaacttcgtcgatagggtggcgaaccagtagttcaaccagacggcgtttctgatccttgtcctcagtacccatcgcccagccaagcgcggcaccaagtgcctccggtgatggctctcggtccacaatttgttctgcgatgtcctcacacgaggatcgtacagcgacttgcaaagcctcgccctttcgatggttgacatcggcctttccgtcatacaggatcagattgaatagacacaggtccctgtccctcgcagcgctatcgccacgcttagagtcagaaaccaggcaatggacaatgctgatcagcgcttctgccacacagagaccttgggctcccgcatcgatcagacgttcaataatcccgtatcgctcatcgttgtcgttgactttcacggcctgcgaaaccgcaatcgtaagactctgcgaggaggggtccagcccaagaagcatggccaaaacgtccacttgaccagtccggattgtttccaccaacgcaaaaccttcgtactcttcggggattcgtctgtgtcggatgatggtttccaggagctgaacatcccgccgtcttatggtctcgattaagccgtccgtgatcaggtgtgtcgtcgctggaccagccgcaccagctgccaagcacattcctaccatctcatagccaaaggtgtcgaggttgttggttgccttattgacagctgtgtctagagttcgtggcgaggccttcaccggtccagagatcaatgcggccacgagatctggtcgagaatcctccacagcgcggataagtgcgataccatcaccatagttgacgtctgcccagtggttcagcaaaagacgtatgacatcgaccgagccatttgctaccgccagtcgaagtccagtcgaccggcaggccaggcacggcagatgatgtcccgagaggagaacctcgatgagatccacgttgtcgcggaaaacggcgccctgaaaatcatcgtgtaggtagacagggcttgctccgtgatccaacagtgtacggataatcgccaagttgcccctggctatcgcgtgatggaggacactgtcgagattctgctggtcggcatgggctgcgagaacatggactgtttccggtcggcatttgatggtggcgcggagaaggatatcactccgctcattgttctgatgtcgttgagcaatcttggtccatgtggttgagtttcggcggcggacaaagttgacgtcggcaccaagagagagcaaagccttgacaacccctagcgacccatctgactctaccacctcggtcaagaccttgttgatctcgcggtggctgaactctgtgccggcctgagatgaaaatcggtttcggagccagccgaatgtttgttcgtcacggatctgggctcgctgagcctggaggagctgagttgcctgtttgttctcactaccggccatttctacggcaggtgccagctagtattggaggtgtgagcagtttggacatgttaaattgaacgagagaccaaaagcaggcgggaatgagagccggcggtggcacgcgcatagctatgtatgggttcgtccatggtgtccgacaagccaaccacgaggctcgcgacatgccgagagcttctgttcgacccggcagtgtggaatgaagctgttcgatatgcagcaccaggggatgtgccatgcaagcggacgattgacgtgtcccaggtggagcggcagtggtgatgtttggttggctgcggtgcttcccctacgcgcattagccgccaggaacatgagctgcgccgcaccatccctgaccaaccagttgaacctcagtgggtgatgcacacctcctgaagcaggcacctgtcagcccaagcaccactcaaaccgtcgggaagcgctgttgatgtgtttcaggtcgtttattgaacgtcgagctgtcgacgtgtcaagccgagccccccaagaggagtaaaggaatacatgacgctaaatgacgcgcgaaagtcgaggcttgcaacgcgcgcatgaagatcaaatgacagacattagatgcaccgaggtgaggctctggagaagctcgatgctggcggggacatggttgtggggaaagaaatggtgatgtcacatgttcaaaaataccttcacgagcactgcctggctctttcctgctacacacaaacagctccgaaaagattgattggataatgcactgcactgcagcagctgcaacgttctgtgactggaaatggtaaccatgcacacaacatccaagctcaccaccccaccaccacttcggcccccaactcgtcgaacaaagctgcttatgtcgtgctcctaagattcgatcccttggccaggagggcagcgcacacagccgcgactgccaccgcagtagatgtcgcaaacgagtatcgaaggccttcaaagtagacatgtcgtgccttgagttggatgtcgggcggcaggtctcggatggccgacaccgaatgacggatctcttcgacaatctagcaatatcacatgtcagctctctgcatattccccacagtccttctctcttcaaagtcgcaaaacaggggcaaagtactctccatttatctggtatctcgcccaaagcatcgggtaaccgaatgctgagcgtggtttggaggattgcagatgtcactgccactccatagactgttcctagcgatcggatcaagtacaccgtcgaggctgaaacggcatggtctgtgatttggcagtaagtaacccaattcacagctttcagcgaggcgacacttaccggcatgatcgaaggtagctaaagaggtaaacagaatgcctgggtaaacaatgccttgacccaaatttgccgggaagatgtacacgtagtacttccaagctgaatcctcaaaaccgagtgaggtcaccaaggcgtttcctataaccatgaggaacgctccagtgcgtaccagagtgaggagcttgccccatcttgacatgacaacaccggctatcaagccgccaataggcgtggcgagggatgggatggcgagccgagcaccggcagccgtagccgagtccagcaacacaacttgaaagaatagtggaaggttgaagaggtactgttgatgacgatgtcagcaaaacgttaggtctaggtgtgtatctcgtggtcatcaacgtaccgcgtaggctgacaacccaacacagatattggcaaattccaccagcaaagggaatttgcccttgatcagacgcagcggaatgatgggaatggcccgagtcctcgattccaccaccagaaacaagacgaacaaaacggcactacccaccaaggaggcaatgacccacggactcccccatggcagctcattccccccaagactcagaccaacaagctgaatagagatggccaaaaccagcagcagtgcgcccgaaaagtccaccttggtccagatatctcgaaacccctgacccaagtcaaaccctccttcggggttcttgattaccaaggcaccaacaacaagagcaaaagcagagatgggcacttgcagcaagaagcaccatctccaaccaataccgtcggcaatagttccaccaaaagaagcaccacaaatagctccaaatccaaacatgccgttctgaagagcctggtacataccccgtttgcggaacgggatcatatccgagttgacaatggtggcttttctacacgtcagtccaacttcttccgttcctcaacattatccacacgtacccatagtcatcaacccaccacccccaaacccagtcaaagccctcatacaattaagcagcaccacattcccagcaaccccacaaccaagacatcccaatgcaaaagtcacagtcgagatgaagaagcacacgcggcggccaaagatgtcagaaacccttccgtacaacggctggaacgcagtgctggtcaggagatacgacgtggtaagccaggaggcattgttcgccgcatcaaattcggagctgatgatggcgtaggtcgctgcggtgatggtgccgtcgaatccgtacaggaaaacattcgacatgatggcgacttgtatccagaggaacccccgagggggcgaccatgtttcctcgtctggggcacgaaggaggggttggtcgtctctgatgctgttgaggagctcatggtcgtccgtgtcgtgcctctctatatctgatgacgtcattctcgctgtcgtgatttcaagagggaagcggcctctgggactgaacaattcggtcgccttggagagaaaatattctggcgccgtgatcatgaaaaagagcaagagaagccaagattttcaaacgcagcatggcgatggtgtgcgagcaagggtagggtcagttgtctcgatatatgcatacatgcaataaagcgattacaacaacctccctttccgctgagttgagtcacgccgggggatacctgcattctaattgcatttggatgctacctacatttaatgtgtgggtgttcatcgagatcatacctcatgtaaatattaataactcgcagccggtctcggacaaacccccacgaccccctctctctaacatgcataacaagaggttcacgggcataaagagctggttatggagaagtatctcttggttcagcaccatgacggcatcactctttgtcatgaattgatcgttgacagcagagcaggtattctgacactggcatcagaatggggcggtatggtgcgattctcaaaacttccttttttgttaacgtcgttggttgtggtgggatactcctcgagccggcgcagcattgctcaacaatcagcggtcagttggcctccgcattagaggtaggatcatcggagctctcctgcgatttcacactcgacaactaggacacaatcgcagatcaaatatgtctgcgttgaagacggactgccaacacttcaaacaccaccagccaaacaagaaaagatcgtcgtaaaagaatgcactattcattgcaacaggtaaaagcagaaaaccgaagtcaatatccaaggaccaaccaaacctacgatatacaaatccaacctacaaccagcaaaacatcctaatccttaaccaagaaactcccccaccacccccttgcccccctcaatgatatcccccacaatccccaaatacccctccagcacccgctccgcctcttccttcccaaacaaccgtccatcataccccatcttgagcctatgccccccattcccatccctaaaaacctcaaacatgatcgcataattcacatacatcgtcaccttgctcatagccatgacgatccacctcatgtgatcctgctctcccggcgcgggttcaaacggctggaacaaaaacagcgtcttggctcgctccgcctcggcatgcttgtagatgtcccccagtgaaacagacccgttctccgtcatggcccagaacccagattgcgtctcctttagcagtgtttgcacgcctgttgagttgtccatctgcgcgcggaagggcaaaaagttggcgcatgtccccgggataagctgggggtcgtcaaggtcaacgtttcgaccggtcaagagatagtcgtacgtcacatctggggaggaggacttggagaggcgagcaaggaggagagtgtaagcagcctggaagacaatgctggccgtcacgccggcagactgcgcgtaggcattgacagggagaccggtcttggcgacaacgacaccactaaccttggggtcatgaatgtgcgcggggaaggagaacctattgccggagagggtcgacttccaaaagttgagcattggctcccgaaggctcggcaggttggtatactccacaaatgtcttgaacgaagtaggcgagacgggcatgggatgaccatcgcgtaaggcggcgaattggtcgtcgaagatgcggagcaaagtcccgtcatacatggcgtggtcgagtttggtgactaggtccatcgtgccgtcagggtatcggagtacaaggtagcgcacaaacgggcggccgacggagaatcgttggtcccagtgtctgcgaacaagtctctccttctcctcgccatcaggggtcggacagtcaaccacttccaagtccaagatgggcttcctcaagataatctgcacccaactgagagggtctgattcgtcttgcttcatgtacatggcgcgcaaaatctggttagcctgcgtgagcttttctgtcaggttgatccaccgctcgaggttgaaaccaactggaagacgccgcactgtcatcaacatccaaaactgctcttcgctgtgaccctgtgtcaggaactccacctgacccgggccgcagtggtagatgtcttccacatcatcatccgacaggccagaagctcccagcctgtctcgaaccacttgcttcacctcaagctccaccccctgatcgagtgccaagtccgccataattggcttgacgcgctgagcttgctcctggagagaaggataggtgacaacatcgttgacggacagagagaagccttgctgacggagcatgctggcgagattgatagcagcgatagaatcaccaccgtagttgtaaaagagtgcactcaggctgatgctctctggttcgacgtcgaataactccgcccaagcatcacggagcgtcttctcttgttcggtcaactctgagtcgtcaatgagttgcccattcgtcgtgggcattgtcgtcgagtaaccggctagtgccttggggtccaaaccttcagcaagctgagcaagcagctttctgttaatcttgcctgacgggaggagagggaaacccttgaagggcagcaagaccttgggcatcatgtagtgagccagagactggagtcgatcaaggatcacggcgggatcgacgacggcagtcgaatagatgccactgctctcggcttccttgtctggcttctcaacgggcacaaagtacaccacgatctgcttcttgcgctgaacttccgccactccaacaacacacaactgcaccacatcagcagcctggctcaagatggtgttttcgatctcgccgagctcgatgcgaaagccgttcagcttgacttggttgtctctccggcccaagcactcaatctccccattcggtagccagcgagcgtagtcgccggtgcggtagagaaccgaaccatcctctgcagtcaaaaaggacttggccgtgatgtcggggcggttcagatacccaattgcaacctggtctccactgacgcaaagttcgccaacagtcccatgcgggacgggaactagcaactctgggtgcaggatagacgcgtgcacagctttcaacgggcgaccgatgctcttcagattgccgttgggcaaaactttggaaacagtcatgagtatcgtagcttcggttgggcctacttgctgttagaataaggagctacttgcagtggtgaagagaaagcaacataccatagccattgtacacatccatccgagtcgcccagacactcgcaatctcgggtgtgatgggctcaccacaaacaagcaatgtcgtcagagttggcacccgttcaggggagataagcttggagatggttggcgtgatcatcaactgctcagccccaacagcattgacacaagctgcaagatcctgcatcaatgtgtcctggtccgtaatggagatgataccgccagaaccgaggacggtgaagacatcgaagtaggatgcgtcgaaaacatagttgaggaaccagagaacatgccagcggctgtcgataccacaagcctcaatcatgccttcagtcgatgccccgacggcgccgtggtgcacctgcacacccttaggcaggccagtcgagccgcttgtgtagatgacataggccagatcattcatagaaggctcgggcagatcagatggcctgttcgcatggcgggttgtgtccactgtgtcaaggctgatcacgtcgccagcaaacgagtcaaacacctcagcgtgcacgctatcggtgatggcgatggtagccccaacatcccgcgcaatgaactcatttctgtctcgggggttcttgggatcgagtggagtgaaggcagcaccggctttgaggacaccgaaaacggcaacaagagtgttgatagacttgcgcatgcatatgggaataatatcgccggtcctgacgcctttggctacaagatgccgcgccaagttgaccacggcgttgccgaactgtctgtaggacatcgcggtcttgtgcttcaggtcggaagacaagccctgcagagccatcttttcaggatactgcgcgatcattcgattgaccaaagtcaaggcggttaggccaggctctgtgggacggaccctagacagagagtccaggaactcgacttcttctgttgaggtggcgatgatatgaccgataaggacttggggctgttcaagaaaggccttgatcgtctcggcaacattgccaagtaagaaggaggctttgttgcgcggcaaatgggaaaggagacgcaatctcaggtgaccgcccgtcgttgcctctgcttcgagcatcgtcgtgtcgccgacaaagtttggctcgtagggctcagagcgcacaatgggaccgtcttggctcaaggactctgcgacctcgctgtccttgataagcacattggccagggtatcgtagtgatcggagcttaggtttgcctctctcaggatgttgcgcaagccgaactgagcctttggcgcgatgtcccagatgtcgtcttgtatggccctggcgagatcgatcagagacgtctcggagtctagctggacacggaaggggaccgtcgcaatcgtaggcccaggtatgtcgagaattccctctacgggcatgtcacggcctgacagcgtgacgccaaaaagtatgtcgttctttgacgagtgcatggagagcacaacggcccatgccgcgtagatgagggagccaacagacactttgtgtgatgctgcagtggcctgaacatcatgggcgatgactgtgttcaccacgactgcctggccggtcgtctgcccgagaatggttgatgggacgccatccagcctcttctgccaaaacgccgcgagctgttggtgctcctcttgctgcagcttcaagacctcacgcacaaagttggcataacctggccgttgtggaagctgctttccactgagcgcggctgacaagtcgtcgatcagaaagttgttggaccagtgatcaaacagggcgtggtgcatggtgacagccaagatgtcatccttcaggctggcgaactgcacaaagttgccacccagttgcatggatctcttctggagctctgaatactcatgggccgttgtgaggggaaggtcttcccacgataaagggacggccatcttcctgatgacttggaggaaggatgtcttgtgcggtacaaacgttgtcctgagcaaaggcaggcgtggaatgagatcctccaaagtcagtcggacctgctgggccgatatgccctgcagacgatagtaacggcgataaacataggttgatttgccctgcagtgcgtcggccaagaaggtatcctgtaacgaggtagtcgggtaagcatcttctacgtcgtccatcttgcttatcctggtgttttgtggcagcagtgacagtcgcgggacgtccgagtgggaattgttctgtgattgcttcgcgtggttgagcagcgcatgcagaggaagtcgaagtatgtcgccgactgagatttggatgtcgtcatgataggccttggttgaaacatggatagcatccagagatgagcctccaagttcttggaaggtgttgttactgttggcgatgcgtgatgcaggaagcttcagaatatcggcaaaaatgtcgcaaagccggcgggtatgggatgggaggtggctaagggtttcgtcttctgagggggcgccgttcgtgtcatggtgatggtccagatgatgatctgtagaggaacgtagaagagtggctctttcaagacgctggacgtccttggtgagctgcgggatgtcgacctttccattcacgttgagggggagctcctgcctcaacagccagtaggttggcatcatgtaactgggaatatgctgagccaggagatccttgagttcgcttcgcaagcgtggccattccaaagccggcctcttcgcaacaatggcagccacgagtgctttgcggccggcgatttcggcggcgaccacgctggagttcgtgacatccgggtgggtctgtaagattgtgttggaatccccaggctcgacacgctgtccgttgattttcacctgaaagtcaattctgccgaccatctcgatcgacccgtcctcgtgggcgactaccatgtcccctgtccggtacagacgaccgggaccaaaggggttgtcgatgaaagcctcagccgtcttttctgggcggttgatatagtaaagtgcaagttggtggccacctagacagagctctcccgggacgaggagcgggctaaggcgtgttgtgccggggacgagcacgaacgaggtggtggtatcgcttggccggccgatattttgagggttttggccaaggatcatctctcgcctccagttcacctgggtattttcacttagaccataagcgttcagtagctcgagttcgtgaacccaagttggaatcagtgccggattgatcagttcgccagcaactgtcatgcgcttgagacacgggacggtgccgggggtgaggaggagggcagttgaaggcgttacatctatcacattgatctgcatctggttgatggtgcgcccaatgtggacggtgaggttgtccttgctggccagacacaggcagccgccctgcttcagagtagaccataccgaacgctgggccgccgagaagacagggttgtggaacaggagttggcgaagatcaggcagtgttgggaaggctgcaaggccggaagttgctgaagaatgaatatgaagaacgccctttggcttccctgtcgacccggatgtgtagataacgtaaactgggtcgtcaggttcgtaaccacggtccaggtttgtatcgtcagcccgggccgactccgcgatgagctgatcgattattacctcacgacctgggaaccggccggctgtgtttctgtcaacaatgacaacctgggcaccgacatcttccacaatgaagttattcctgtcctgaggtgtgtcaggatccatggttacataggccgctcctgtcttgagaatggccacgagggagatgatgaggcttgctgatctctgcagacaaactggaacaaaggagcccctgcccacaggcagctgtctggcaacccgattgctgatgcgattcagctcatcataggacagtggacggtcgccttcgaattggagagctggggcatttggtgtcaggcgcacctgccgttcgaagagcttgtggacgttgtcgtatacgggccgagtaagaggcttgcccatctcaagcatgagatccagttcttctggagatatgatgtcgatctcaccaaggttgaagttgggatgcctgaccatttctgacagagccatcacgagatggtcaagaaccaccatcatcttctctggcgggatggatgcgtcgtgttgtgcagaaacggatatggcatggctaatttgtaccgcgatagtcacaggatggtggctgttgccagagtagggcgtcaagacttcgtcatctccaacaacaacaacagacaccttgaaactgcttgcagaaacggcatccatgagttcgggagtggcgaagaaggcatgtgttgccgacaacgtgttgagacggtcagcctccttgatcaatgcagctgcagtgagctcaggcttcacatggagcttcaatggatattcctgatcggcatacccaataacagagccatggccctcgatagttctgtctctcccctcggcaacaaaagcaatatcgtgaacctcgctgcccaggttacaatgtcgctccagcaccaaacccagagcagcatacacgacggcgtgttccgaaacacccagttgtttcgcacatcttcggagcgacgacccgctgatggcaacggagcttgccgcggcagtgttctggaaggtgccggatcgctccagggggaaggagtggaggaccaggtcgggaagggactgcagagtgtcggcccagaactcggccgacttttggcttgctctttccctaacaagccttagataatgtggaaagagcagcctgggtgctgggaccccacctgacaagaagcataagaaatctctccagaggtgtcccagtgatgtggtatcagcgaccagttgcggcaggcagagagagacatggggtccggcactggcccattcgacgaccggcatcgcgggcccttggagaccgaaggagtggatatgttggaggttggcatcggaggagccttgaatgttcctcggctgcttgaagatgcgcagcacgaagccgtcaccggtcttgtcttccgcaaccgttgcccgcagcatgtggtgctgcaaggcgagggcatgccatgcctcgtggagctggtcgaagctcttgacgatgtcggtggagaggtccagacggatgatggaagccctctttgccgcttccggatccttcagcagcagtccttgttgaacaggagtgcaagggatctcggattcaatctcgttgtcgggtgcccagtgaccaccagcttgactgtcggcaccgatgccacgcaaagtggaaagagctctggcgacttgcttgtatgtgacgtggagcgacatggtccggttgatcgacttggccgtcacatgaggctgtttggggctgtccagccagccatgttcgactgaagtatcgatcacgcccatggtggacggtgttgtcgacgagggtggggtctcctgaaaagaaagttgagtttctcctcggtgatagcgcatactgattgaacagggcgagttatcacatgagctccatagaaagaagtcaggagaaagaagaacggttgggtgtggatgcggaacaagaagaagtatgagagtccagatgcttgagtttatatgcttatatgcattttatttctcatctagggctggccaccttccatacttctggagacttacaggtgccccaggtccccttaccgaggaacagatccctcagactcttcccgtagggccaactactcaccgtatcttttgaggaacccaaaacgaatcttattaccacacattgcaactggatgagactcggattcagacatgtacgacccgactacaatgatatctggcaacccacagataccacattgtgtcgacatacaattaagatccatcatttagacatattctagcctcgaatctacctgtaagaagagctatcaagctcttctgtacgctgtgaagcgacgagcatgtttccagtatcgaatcttggaagaaccggcatcacccgtcatcctctaggtacggcccgaaacaacccgaataggagttagggaggtatctttagttcacggtacctatccacttgcccatagactcccgattcgtcttttcaagcctcccggcaaatttttcggccctggtatcatgaggttacgtgtccatgcacatattgcataccacatcggggatccgggtttcgctgacttactacaacggggaatctgctgccctgtggcgcagccccaaccacaagagtgacactgcatacacccatcttggatctcgcggagttgcggggagcctcacagccttttccccggagtttgctccggattgggtattccgcctaatgtcgtcagtacaccgcgtatactggccacacggttcatgcaatgcagttggacctcacagtctgtggtcagcttcggccgaggcggtgtccgcttaatctgatcgcctgaatagtgtcttcaatgtccctaaacggaaattagagcacgactgaagggaacgtcctaactcaatctttgcgcatcttgacttctgcatcacaatgtgctgcatttttctaacgcacaacgggcaggtggcctaaccggcgacaatctatggcagctgcaatgttaaccgcttatgcctctacacctttggcatcaggacggtttcacagaaggatataaaccccgttccctttctaccaagatcatcatatcatcagttcccacaacttccgcagtacatttcatcagcacaattacgagttttgaatcacctcgacacatcatactttagtcaagatgttgggcagtattcttccattcaacgaggagacggcggaccgcgtcagcgcctactgtgagaagaactctcatgggatccctgacgccctggttgagcattgggagtggactcgcactcgcttccccgatgccgacaagatgtctagtcgtcttcagggctcctggatgatcttcactgctcgtgaccgcaagcccaagagaagtaagcaatcattatccatcacccacacatagtccagagctaactctggtgctttagtcctcgagattggttgctactctggctacagtgccttggcctggtacgaaggtacccgtgacaccaaggccgagattgtcacgcttgaatacagccccaaaatgattgccgcctctcgcgaggccttcaagaagtacggggtcggtgaccgcgtgaagctgattgagggtcccgccgagaacactctcaagaccctggagggcgagtttgacctcatttttgtcgatgccaacaaggacggctatgctggatatgtcaagacgatcctggaccagggtctgctctctgccaacggcatcattctctgcgacaacggtaagcccttcctgacgttattctcgaaagcgaatgctgatttgaaacagtctttgcccgtggcctcaccatcggccccgactgcgcaccttggctcaacgaccacgtccgcccttactggaatggctgcggacaggcattggacaagttcagcgccggtctcatggaggacccccgcatcgatgtcttgcttctccctgtcttcgatggtgttactcagattcggtggaaggacggggctcagcgggcttgatgccgccacctattggggccataaaacatcacggttgctcggttcatgttgattagtttgctcttgacacaatacatacaacatcccccatcgtacctcttgatcctttgatgattattgccttcaagttgtgatgtgtcccaggtatcattttttgccacgacgtgccatggtgccgaacgatacagccgagcgtggtgaagagaaggttgagccaagaccacgtgagggttcagccgcgttgcagattgcagatcttgatcagagacaagaaatgcgagattggaccatccaaccaaagataagcataaagaataagcgaactgttgtttctgctgtgttaccttgttgggaccttctcgaagctgccaatgatgagcatgggcggaacaattttcgcctccttctcggggaagaccagatttggtatgttacatctatgtcccctttggctttcttccagaagggcagatatgcaaccatcagtccttggcagttcctcctcctgtggggatagatgtgcatgtaacgtggattgacttatgtaaaaatgtgctatatatcaggatgagtctgatggggcaggtagtaactacctatctaattgacgtgtagatctcgcagccttctccacctccatcttgtagcacctaccctactccttcgtacagaatattcccccccaaaagcacaatggcgcaatccctcgcccaaaccggcaccacctgcaaactcaccacccaccccatcccctccctgcccgccgaatccccccccgactccgtcctcgtccgcttcctcgcctcccccgtcaaccgcgtcgacctcatggtcctaaacaaccaataccccctcaaaccaaaatacacctcccccaccaccaacacccccatccccggcttcgacggcatcgccctcgtcgaatcctctacctccccactcttttcccccggagacctcacactcccccgtgacctcggcctcggaacctggcgcacccacgccatcctccccgccttctccctcctcaaactcccccccagcgtcagcaccatctcccccatcgacgcatccctcatccgctccggagccctaatcgcccacctcctcctcaccaacccctccacccccctcaaagcaggcgaccacatcatcatctcagcaggaacaagcacagtctctcagttcctcatccaactggccaaacaccgcggcataaaacccatcctcgtcatccgcgaccgtcccaatccagaaccggtcaaggccgagctccttgctctcggtgcagaagctgtcctgacagagtccgaggtagaggccggactccttctccccaaacaacccatcatcctcgccctcgacagcgtctttggcaaaatcggcgagctcctcgcagcttccctcgcaccaggcggcaagttcgtgcttgtcggcttgttggctggcccaaaggcgagcatgcagctcacgactcagcatttgttcaaccggcagctcagtttcctgccctttagggggtcggaacacctcaagagaatgggggacgagcagacggaaagcttgatcggtgagattgcgagaatgtttgtggatgggacgttgaaaaggcccagggtcaaggttgtggactggaccaccgctggtgagggtgaggttgagaaagcgctggaagaggcggttgagcttgccaagggggaggcaggacacgtcaagactgtttggaaattgacttgaactgaagacatagtgagcactggatatcaggttacctagaggtgtagaacttccaattagtgcaagtacaagaataaaaaactccgtgggtgtttctctcgaaccgcccaagtttgctcgaattcacagagaattgaaaaaaagtccgccgacatccagtccattttgattttaccaacttccctgtctgcccaaacgcgagtgtttccaactttatcacatgtacattacacatggcccagataccacactcaaaaggcggtcaccaatctgtcactgtttccaacacctccaatccaactcccgaaccataaaactcttacgccgcaatggcctgaatattaccaaacatcttccgttgctaacaaagccgtcagtcacatcctcacagtcaatcaggagagaaagaatactcacagtaaagcacaccgacagcaccaaactaaaagcagccgcaacataaacaggaataaacacctgcctcagcgcgacaacaatcgcatccgtggccgcagcacgcaccccaggggccaaagagctgaagaactcgccactggtccccgagatggccatctgaagctgctcccgtgtcgcatcaggcaggaccacaatcagattcttgatagcgtcattgacaaagatggcaccagcaatcgcaagacccaacgcgataccacccaactgacccagcatcatgaacgagatcgcatacgccatgtccgctggcggggtgacagcttggataacagcatacccggcctggataaagcaaccggtaccaataccaagcagaatctcgaagccgtagatctgaccctcaggcgtctcggtcgtgatgcgagctgtgacacggttagtttcccttccattggcagcagaacaagacaaagacttacacatcaaaaccccgccaatcaacgtcaaaacactcccaaaaacataccacggctggaagtaactaaacctcgccatcaaatgcccattcgcaagaatagcagcgctcagcacaaaaataagcggcaacaacctcaccgccgccgtgatagcactatcgcccctcgtgaactggaaatacagcgggacatagtaaatcggcacgaagccagccgtgttcaccgccgcagcgcagcaaaaaagcagcaccgcgttccagttcctcatgaactggatgggaaagatcctcgaggtcaggttggtcaggatggtgtaggtttgttggatcccaaaaaggataaagagcgagaacgccacgacaaaaagcgcgatgatctgcccgctgtcccaggcataaagcgcgccaccgaggttggtagccatgatcaaggccgtgatggctcccatgctaagcacagttccgacccagtcaaactccttggcaagcgtcagggtcttggtcccggcacgaggtttgaagttcgggatccaaaggaggtagaccggggcgaatagaccagcgacacaaaggttgatgtaaaacgcccacctccacgtcgccggtgactcaacaaacgcaccgcctaccacgggtcccaaaaccgtgccgataccccagaccagaccgacgaaactaagatacccggggcgctcgcggtcggaggtattgacggagagaagggtcatgacaccgaggtacatgccattgccgcccatgccggcaaggacacggccgatgatgagggcgtccatgttgggagctgcaccgcaaagggcagagccgacgttgaagaggatggaggagaggatgtacagccatttagcgtcgaagaggccgtacaggcggccgaaggggaggacgactgctgctccaccgaggaggaaactagacacaaaccatggtcagagactgtactcttgcagaaggaggtcgatgtaaacatacccaacagacagccatggtagcttgagcgcatcgccaaaattgttgaccacggctggtgtgatgtcggcgacgactgtgttgtcgagggagtagaggaaaatgctggatagaatggcaacgacaaccaaggcccactttaggaggcaagaaatgttagtgaatctctcttatcacaccatatctcaaccggcaatgagtccttacaataacaccgtgaatgtttcttggtgatgcattctgatcaggttctgctggcgcggcagtcggtgcaccggcttcgagctgtgaatcggagctgtggccgttgtccgccggcaactcaacggcgggatcaagcggcttctccttgagggaggccgctccagaagacatgttatggacaggcgacccgggggtcttggtgggtatcaggttcgacctttgggattgtagcaggacgattgatgatgtgatgaaaagttgttgagaggaagagagcttggtctggattaaaagatgcaagatatcggatttcagattcgcgagcgctgcatgtggccggggggtcgacgataaaaaggagcgcggtcgatattgggccgacacaaaaatgaacaccaaattaaatccgctaatcaaaggaatgcaaatcctttgcaaatccagtgattagaaatgggtctttggacacctgtttggcagcaaacaaaaagaaagggagcaagagggacggcacgtcgcagttgctctcccattcaaaaacaggggtccacactgcccaaagaggaaattgtctcatgtcactctcagcgtatcatgtaatcagacacaaggctccattttctaccacaactattctctgcctgacaaacactctcattttcccgtgacaactttcttcaagtgctcctccaatccaggaatctcaccatccaagtcgatgcgcaaacccttggtgatgcgcgcaatgaggacatagacaccaagcacgacgtagacttcgaccagctcctccacagtcagcagcttcttcgccttctcaatcgtctcctcggtgttgttgtatgtggcaagctgctcgtccacgagttgcaaaatggcccggtcacgctcagtgaagacggtctcttttgccaatgcatcgacacccttgccggcggtgcgcttgagggcctcgaatttctcttcaggcatgccgttgatgcgtgccactggagcgttgacgtcccactcgtactctgcgtccagcacagccgagatgcgcaggacaacgagctgccagtcgagaagcggcagaatgcgccggttgccgtcgaagaaattggcgtagactcccatgagccttgggaaagatccatgtgagtgtcccaggaggtgaaagatgttgcggcgatacgggagatgggttatcgccgctgccacctccggaggggcggtttgaagatccacataggggacaaggcagttctgagtcttggtaggggcagacatgataggcagattgatttgatggttcaccttgcaccgtgaggcttctactgcacaaactttgtaccattatgtatccgtcaccttggttctcagttctacaagtcctacaactactccgagtatgacaccatgcggcgtgccccgtgtcccaagtgtgccgtacgatgcagtacgccctgtagggcagtgtggtctatgtggaactctgccacaactctttttagaccttcatgtttcctcatccaaaatcatgcatttatctccgatgatcgatcccagcgctgccctttgcagagttgcgccccgagaaaatttcctctttggaagaccagaaggtgaccaatccgatgatttcaaacgaaccgatgcgctaacccgcaatcggaactccgacaaaaatgccctttcaggaaaccccactatttagaccatttgcaggagccccactcttctgcttacaacatcagtgaaacggttaacttcctaattggaccactgctcggcaaggcttgccgcatcctgcgctcgtgacacgggccgaaccctaccaatcccaagcacgtcatggctgatccattccatcctgctctcaccgatttttctatctccggtttgtgcaaattatgtccgacgagccttggacccttggtgttgaactgtcgaggtgctgccacctgccaagtcttgtactccaaagtacagctacgaggactactacatgcggtagccgtgcgtttggctggcgagtgcctctcgagtagaacgcggggagaccctttctcggactatcgcaagaaaggcttgtgggctgacacggctatcgacatgctacagagctggtgtagcacgccgggaaggcccaatgttggagatggtagaaatacagctgcatatggcaacgaagacatgctgatcaatattgattatgccttcatgtcttacttgacgaaaaagggtatcaacataggtagctaagcagaaccaacaccaacatcacaactctttacaatgcataacgccaccgtcagcaatacccatctcgacgagcaccaacgacttctcgcgttgagttggagctgggtacagcttcgcccctggacgacagtactcattctgctgctcaccaacctcgtctggacgagataccgcagcggattgcgccagataccgggaccctttctggcgagcttctccaacttgtggaagctacgggcaacatggaatcagaacatgcaccgggaaaacgtgcgggtgcacgaagactatgggcctatcgtgcggattgggcctaaccatgtctcggtgtcagatgctgagagcatgcagacgatttacggggtcaagaatgtctttcccaaggtatatgcgcagactccatagccgcccagcgtcattagctaacaccagcctacagagcggattctaccccctagcagaagcagtctacaaaggaaaattcctccccaccctcttcaccaccacaagcaacgactaccacgccaagctcaaacgcggctccgcccgcgccttctccatggacgtcgtgataggcctcgaagagtacgtaaacaagtgcatttccgtcctcctccagcgcgtccgcgacgtctcccacaacggcaagaagcccctcgaccccgtagcctggatgcagtacttcgccttcgacgtcttaggcgagatcaacttctccaaagacctcggtttcctcgaagctggcgccgacaaagacggcatcattgccgcgattggccagattctaggttacgtctcgttgataggacaagtgccgcaggtgcacaagttcctgctcggcaacccccttctcgccaagatacccgccgtggagaagacaaaccaagtcctccagttttcgctgcagcagatccaagagcggcagaagaaccccgtgccgaggaaggatatcctcacccagctcctcgacacccatcacaacgacccgtccgccttgtcttttgaggaaatcgtcgctattaccacgaccaatgtcatcgccgggtcggacaccaccgctgtttcgttgtcctcggttatctaccatctgcacaagtatcccgccgccaaagctaggctcatcgaggagattgactccgtagccgcaaagctggacggtatcatcacttatgcggaagctatcaaactcccctaccttacagctgttatcaacgaagcgatgaggatccaccccgccacagggttcattcttgaacgcattgtccccaagggaggcgtgacacttcacggggtctacctccccgccgggacagtcgtgggcgtgaactcatgggttctgcaccgaaacaaggatattttcggggaggatgtccactctttccggccggaaaggtgggtggacggggatgaggggaagattaaggagatgaagaggaatttgtttactgtgagtcctgcctgttggtgctacgggagtcatcatttgatgctaatactggcgtgacaaaacagtttggctacggccccagaagctgcattggcaagaatatctccatcctggagatgtggaaggtcgtgtttgagctgtaccgccactttgacataactttggccagtgacaaggagtggactgtcaacgggacttggtttacggcgcagagtaatattgaggcggttttcaagccgaggaagaactagggggttactcttgcgcgcgcaagttgtgtaggactcaggattcagggtgggtggcacttggtgtatgcttgcggaaatatgacgacattcttattcttctgtatccaaccaatgcctgatgaatgtaatggtgatgttcaagtacataaatgtagatgcagcatgactgactgtctcatcaaatcgacagcccctgaacaaccctcaaagccccctcaatatcagccgacgcctttccaagacgcaccatcatggacttcaccttggtctgacgtgccgggctagctgcaacctggctggtccgctcaactcgcgagagcagcatctggaaattgcgactctgcagtctcaaaagcacccgaatcatgtgaacctgctcctcgtctgaatactgattcctgaactcgtccgaaaacatcaaggggttgcaagcggcagtgttggccgcgcgtcccgatgagctgcagaacagttgggctggcaaaggccctgaaccgacagcagctgtcaactgtggctgtgatccaccgagagaagaatgtgactgcgcagaactggagtcggtcaacgaagatggcgttgcttggctactagagtcgctgccgttgttgctcagaatggcgcctgcccgcttgatgcggagatgaatgcactcaaacatctcggtgagacgatcgcagaggatgaggcgcatggtgtgaatagtagaaaggtccagacacttggggcagtcaaaaggtttgcagcattgaaagacgagccatttttgaagccgtaagacttggtcgagagacatggtcgtgatgtgaaactcgtcgtcgtcgagttgctgcacgacacggacgaggtcagtaagacacgagcacggcggtaaaccgggtcggtttgggtttggcgggttctgaacgcccgagagggcccaagattggcctggagacaacggcgccgtatccagtgcgagcatgcttggtaattcttgagtagtggtatgaggaattggccggggctggggctggggctgcgagatggggccttcgctggataagaagaaatcaaggttgttgtaggggtcctggtgtggcttattggactgccgagcgtcattgctcccactgttggtagagctgcttatgctggatcgaacctccccagaggcactgtgccggccaaagtccatatccatatccagcccgtcgataagatccactgacgtgttaccagcagtcgtcagccccgctgcccacggctgatctgccgagtctaccaatgcgaactcgcagtcaaagaagtcgttatctaacagcggatccccaccaacctgaactcttggtgctgtggtggccgcctgctgcgacggcttggatggtcccaaacctgcgccgttcaagccctcgccttgttgatcgcccggttgagaagacgcatcgccaatgtcctgccatgggcgccctggtgggttgttgggttgcggcgattgcgacgaattcgtgcgaggcttctcccggccgttacttgtcggcacgacgcattcgaccattctggcccggcatcggtcacaattgcgagggttactaccagtgcaacgcagctaccagacgggtgagaactttgtcagattgcttgagtaggaagctaccccgatattgaacgtacctttttggtctggcaggcgacacaggcaggtcgtcgcataggacgagtgcgatctttaaccacgccgggccctgagttgcgtcgcacaacttccatcccccctccctctgcctggccgccgcccgaacttcgtagcgtgatgaacatggcaggccagaccaaagtaagaaaacaaacagagcagcagcaaaacttgagatataactgtcgtccgtctaagggctgtggctgcgcgatagatttcttggcgaggtgtcgatgggtgggttgcgctgggggttgtctttaagaagagtcttgtgggggacagggtggggtggcgagcacataagccggggtgattacaggactcgtatacgtggtgcagaataccctgatctttgtcatctgcagcctcgctgcgttgctacagtttaatgcagactcagaaacacgcaagcggggttataggccaaacgaaaagccagtaataacgaggcggacgtcatgcctctgccctcggagaaggggtggaagagggaaacaaaatcctcctgatgaaatggaaaactggttggcgtccatctttgtgcccatttgtgtaagatatgcggtccaaactttgtacattgtgtgcaggtcgaaaatacaggtggcaagtgaggaggggtaactcatggtccgtagcccgggcggtattctccgacagcacacattacacaaagcacagaccgccaacgcacatgacgaagttgcaacaagcatttttgttggatcgccggaagccgttgccggatcgaactagcttaccggctgtccaacgattgtggttctgttgggcagaaaggccgacgggggttacagagggccattagggtcctcagctgacagacaccccgcgtatttcgaaagaatcttgaaacatatagccgatgtaggtaagctgactttggcagcgaataagggataagtccttgcaagaaaccacacctccttcccgaacccgagcgggatggggattccatatcaaggcattgctcctcaagcaatcaacaccaacaacgacttcttgatgaccatttcgttccgttgcgtctccaaacacatggcgaaaaccgagtctagtttcaacggcctacatgtatcgcgcctgttatgcggcgcagtgcatgttaatggcacgatcatcatcgaaagcgtgccggcggtcgaatcctgcagtatagattaggtaggtagtatgtaaggggcttgcagatctagcaccggagcgctgactgaatcacaaaagtcagagcacgcaagatgccgacgaagtgatgagctaactccgacgcagcaacagaagcgctcctgttatcatcagcatcgccgtccacagttacaggggctgtgtgtccacacaactcatcagcaccacagaagcggaactgcccagcagtttatcagttctctcagccttccacatgcttcactcttcgtcagtttgatatatcctgtcacatttaccacaaggcacgactgcaagatcccctccaatcccgttcttgcgagcaagtggtcccgaagagacaaacttgcaaattgtgttgatctcgaagcaagctggaaatgttgctaaatcaattgcgccaacgtgtgtcatcctaacctaccttacttagagttagataagccgttttacaggagcgggacgactcgccatcttcacgacagtcacgatatgaaaggccgacgaacttcaggcatctccttcatttacctccatattcggaggcttttcagaatgtctcaagcgcactcttcatcgcgaatagcactacatcaagtatctctctccccttttccactgggtaactcagagtgcattctgggtaggttatatctgggtccttctatagtagtaggcactgtacatccagactgtcatttccagggaaatccgatacagatttcggatgacatactgccaaaaactgaggaagatttctctccctatcttctacattcacacccctcagttttccaataaacctgaagcatataaccgccgacagaaaatagaaatcgaaaataaaacgggctgtagaaaacagaggtacttcggtacatcgagcttgcattttcaggctctcaggcggaatgatgatgaagcataactctttgtataactggaacatttaccactcccctcttcgaagccgaaaccaagatcatatgtatgctatcgcaaggaatgcgttttgctgagaattcagctaaacaactggctcgcgcttggatgcccgtgcacgtttgtgctggacttggctcatcactgcggcacagcccaggccctcacctcaggtatatagtcgtttgctccccctagcctacccgcaaatctcgggtcttagggtttttaatatcgggccgatatactataatcccataagatctcgagggcttttgggaaaccggcggtaggacgggccagccccttctcaagtgcgtgctgttcatcccagtttagcaacccccttcactcgcctatccagcatacacttcctactcactcgtactgcattctaatcctactatcagctcgatataacctgaatagtattgttcggcctatcttttcgtggagccaattatggatttggcaccgacgacttcctaactcgcaataaggtctggatggccccaacatgtatccacatccaaattaacgcagccaacaaacccattccgaacttctcaaggaaaagggcgatatagcaggcatcccatctcaggaccatgacgcaatatttgaaaagaacggcaacagaattatcacctcggtcagctgaaaaagcaggcgagtacaatgccaattgctacttccaacagaaacgtggaggcgaaatggctttttgtagtggacttggcatagagtcctgagcatgttacctccttcagcgtagtcgacatggtttggcaagacacttgtatcaagtttgtaatgcttccggttatctggttcccgccagcaataagtcccttggcagggagaaccggtgcaccgcatgaaactgtagacttctttccagacagttgtcagacctgcaaattcttgttcttcaaggagctccgccctctctgcaagttgtgtagccgtcgcccctcctcgtctcgtagcctgctgcgtcctcacggcaatccgttgtgtagtctccttgtaaaatgaacgagacgccgatcctcagccgcctcaaactttcaagaaacattacggttttatggacagtgcattcgtggcaccggctagcatacggatgcgccaacacgacggcctccaaagggacatcttcatgcacgccagcgaaacaccgccaataacgatgcttccagtatgcgcagttggcgccagccgcttgggcgccaacgcccagcaaaatgcctgatgtgcggggttggcaatctgggcaggactgcaccttaacccttggagacagcagcaacaacaaccacctttgagctgcaacaatcgaacccactaagatttgcgctacgtagctcaacaattactcgcggtaggtgattctgatctatgtctgagagcttatcctggtttcagctactgatttgttgagcctactagtttcgtccatccacccggcccacctgctcgccttttcccgctgtcggacagtcatacgagtagctacgagagctaagctcggcgctttttcgacaatgcgccttctggaacgcaatgataccggcgattttagtttgacggatgacattcccgacgaccaggtcccaccgtatgcaatactttcgcacacctggggcgacgaagagattatctttaaggatattaaggacggtatatgcaagaagaaaagaggctactccaagatccagttttgcggagatcaagccggacgcgatgggctgaaattcttctgggtcgacacatgctgcatcgacaaatccgatagcaccgaagttcagcgcgcccttaactccatgtttcagtggtaccgcaatgcagctaaatgctatgtctatctcacagacgtctcaacctgccagcaggataccgacggcaactttggctggtgggaattgacctttcgaaaatccaggtggttcactcgtggatggaccctacaagagctcattgctccagtaattgtagaattcttctccaaagagggcgagcgtctaggagataaaaagtctttggaacaacaaatccacgatataaccgaaattcccctagaggctctcccaggcaatacattatccgacttcagcatcgaagagcgtctgtcgtgggtcggaaagcgtaacactacacaaaaagaagataaggcgtactcgctattcggcatctttgatataacaatgccgcttctgtatggcgaaggagaagatagagcatttgggcggctgcgagaggaaatcagtaagcatgatcgctgtctgtccagtctgcattctaccgacccgcgccttgataagaagcgcatcgaggaggcaaaaggtgggttgcttactggcgcttaccgctgggttttcgccaaccccgacttctgtctatggcgtgaacggtcggagagccgcttactctggatcaatggagatcccggcaaaggcaagaccatgttactctgcggcatcatcaacgagctacagggagccattgttgcagacgggcattgtcgtaatctggcctacttcttctgccaagctaccgactcccgcatcaataacgccattgccgtgttacgtggcctgatctaccttcttgcccaccagcagccacgtctcatctcccacgtgcgcaaatacaccgacgctggtaaatccctctccgatgcaaatgcgtggtttgccctctcggacattttagtggggatgctaggagatccgaacgtgaagccaacctgtttagtcgtcgatgccctagacgaatgtgttatcgacctaccgaagcttttagactttatcgtctgtatctcatccgatcggataaaatggctcttaacaagccggaacgagacgatcatcgagaagaaattgaaatctaacaatgcgcgaacaaggcttagtcttgagctgaaggaaaatgcgatggaggtgtctcatgccgtcgatgtgtacatcgacgataaactatctgggttggaagcacttcaggacgacgccctgctaaaggatcaagtacgggatattctacacaacaaggcaaacgacacgttcctctgggtcgccctcgtcgtgcaggaactcagcatggatggggttgagagctggcatgttctgcagattgtcgaagaagtgccaccggggctggatgggatgtacaagcgcatgctggatgagatcgagcggaataaacgggactcggaattctgttggcgcattctctcggtggtgacggtagcataccgcccactttacttggacgaaataggcggcttgtctggattaccggaacagattgtcaggtcgacggaaaatattcagaagatcgtggccaagtgcggatcctttctcacggttcgagataaccagatctacctcgttcatcaatcagccaaggactacttaagtgatcaagcctccccattacttttccccagtggtgtggctgtgacccaccatgacatatcggatcggtcactaaagcttctctcaggcaagttgcaacgcgatagatacggcttatgtataccaggattttctatcgaccacgtccgagtgccggacccggaccctcttgcgacagtgcggtactcgtgcgtttactgggttgatcatctctgtaactggcagtcgagcgacgatagcaagcacccaaatattttccaagatggtggtatcgtcgatagctttctgaggcagcactacctccactggcttgaagcactttcactttgtaagagcatgccgcaggggatacttttattggtaaagctcgaaagcattcttcaggtaggctctacccagtaatagtatcctattattaagcggtcctaataggaatttagcataagtcgattacgtctcaattactaagccttgtcactgacatgcaccgattcgttatatactggagatgggttgttgagaattatcctcttcaggtatacgcttcagcacttgtgtttagccccgcccgaagtataacaagaggcctatttacgcaggaagaacggaagtggattacttcgaggccaattgtagaggataactggaatgcgtgccggcagacgctcgagggccatagcggttcggtcaactcggtagcgttctcgcccgattcgaagtgggttgcgtcaggatcagacgaccataccatcaagatctgggaggcggccacggggtcatgtacgcagacgctcgagggccatggcggttgggtcctgtcggtagcgttctcgcccgattcgaagtgggttgcgtcaggatcagccgacagtaccatcaagatctgggaggcggccacggggtcatgtacgcagacgctcgagggccatggcggttgggtcaactcggtagcgttctcgcccgattcgaagtgggttgcgtcaggatcagacgaccataccatcaagatctgggaggcggccacggggtcatgtacgcagacgctcgagggccatggcggtccggtcaactcggtaacgttctcgcccgattcgaagtgggttgcgtcaggatcagacgaccataccatcaagatctgggaggcggccacggggtcatgtacgcagacgctcgagggccatggcggttgggtctactcggtagcgttctcgcccgattcgaagtgggttgcgtcaggatcagccgacagtaccatcaagatctgggaggcggccacggggtcatgtacgcagacgctcgagggccatggcggttctgtgaaatcggtagcgtcttcccttgattcgaagctgattgcatctggatctaacgataccaaccccccacattaccaacgctatggaatagacatgagcaagagatggattacgaagggttcagaaaattggctatggctgcctctggaatatcagtcacaatgtttcgctgcagcggcatcaacaattgctatttgctgttcttcggggcgcgtcctaactatgaagttcacgacagacagctgagctgatctctcattctttgtctctctcttttttttctatcatagcgtgacacaggagaggcctggcggtctccattaatttataacccgtcataatactctaaatccttctggatcccgctcttttatcacttcgagtaccctgtttcgttatgaagacaggtggctctagaacacttggtagagacgtcatttggcccactcgaacaactcgagatcgggctagttggcttgacgtagttccaagcgccacaacaaactttatttgatctggtttcctttaacagccgcgaggcatttgattgtccgcctcaattccaaccattgattgtgcaggtagatagcgtttaggccgtgatgcggctgattgcttgtttgccgtgtaacataaagtcttacttgcagcctggtgttaatttcattggcatgatccttcagtacacgctgctcatatttcttctttatcatacgagacagctcccaagatgatttgactgcagtaactaagcctgtgaaagcggcagctgatgcaaagggaactaggggggtatgacgccataagtgctaatttattaataggaagtaataaagaaacttaggtaggtatgtaaatataaaatagaactgtaattaagacaagcagtatgttagtttatatgacgattcaactttgcctttaccttgacttgcaaattcgttattcgaacttaagctggttaatttgtacatttcgaaatcaaacacatttttccaagctgaaattgacaggggggtagggtggaagaggcagtgctgctcctaactacacaccccacccatgtctaaaagcggcaatacattttccttgaccgggaagaacagcttgtgcgccgccaggtgcttcgccaagctctccggtttccgcgcgccgccgtccctgggctcgggtaggaggaggctggtctgtcggaccgggtcgaactggaagaagtcgccgaagaacatgacgatcgggatcccaccgaacgggcgatgctggtcgtccctgtactgcctcaggcggctgtccaccgccgcgagcgtcagaacgcccacctggctgatctcctgctcatgtgccctgtgcccgggcgcgagcagttaagccgagctgcggacctataaaggaaggtcacgcgttgaccccgtaatctggcacctgcagaggtctcgagtttagtcattacagcagctgcggagaggcactgacggcccatttgcttcgtctgtcaggccggatgggtccttgtcagggtggcttgtagagcaaccgtgcgagagatgtgtcacgattagatttcggaaatccccgagtcccaccagagcgaggcgtctggttcaagtgacgccaagttctcccgcgggctaagagttctcccctatctgactggggaggacggccaacggaggttgtaggtaaaacgttatgcccttcgcaagggcaatagtgccgctggcaataggctctgaaactttaaatagtcagacgatccttgcaatgcatctatcttgtttctatcacctcgattgccgttgtccaggcttcgtgactgcccccgacatcaaaagaatcttcaaattcctctccattttcgtgttccgctcggcacaatacgacaagccccgctgcagtgcatagtttaatagataactcaagccttgggagatgatcacgaattagagcgaacaaagacctccagtggccaattccacccgaaactcctactcggaccaaagtaacgctttggagtgttgctttgtgcctcacgataaaagccccaagatcctgtacgctacaatatgccctatagagccctaggcattgtagattcggtatttgaagcttcggtgcgagctgttttaaccggtcaacccgtgggccgtagtcgacgggtgtgatgaccagatccagttgtgtgagttgtcgaaacacaccgataaatgctgataagtcgtccgcccatcggtcctcagcgcccctcgttgcctcggcggatacatttagtgtgagctccgtgaggcttggagggaggttcttgtagtattggaaatgcgactccgagggtctaagaatgtctggcgcaatcgcttccctagagaggacaccagctgtgatggcaaggctgctaagagcggcaccacttgtagcgatggctgtaagggtgatgcgaaggacttggcccagaaactgaacttccatgtaatcgtctagggcggttgttggcggtagacctgtttgtcggccatgcgctagtgcaccccagggccggtgcatgttactaatgacggcagcctcgatgttgggaagagaaatcaacgcctgcgtgatgtaggcctgcgcaaggccggacatgattatgtgttcctgctcttcccacagtgacgtataagccaccttatccaaaagcgtctcatacgaggcctgagacgagacactcccttcatcggttccccgaccttcctctccagggctttggtcctcctcttcgccggatgagtgtgcatcatctatgctgcccactaaagctgcgggaggggatcgaccttcttctatggccagtaatatgtcgccttcatgccgtgcagtatgaaagtatgaatttgggaactccacgaaatgatccgtacagagttcgagtgttttcacagcagggccaaagtctggatgtcgcgcaatctccacgaggttttcgaggctgagccttgagagcattatgtagcgggtctggaagtaccggctgatgaaagctggcaacgtggctgattttgtatatttggacgtcaaccggagggcggagaagccttgggcgtctagcccgccaaatatgatagccagcagctcgttaggaagccgaagaagtcccaccattgtatctgagaggattcttaaaggtatgttcgagtagaatagagcttacagctatgcaaactttgagggaaatgtatcgtaatgtgttgaatggtgtttcggctgagctgtgggcggggtcaggatgggtgggtggatggatggaatttatttcgcccggactgcctaacttttcaaccggcttcacttcgggtcaaagactagcgagtgtcacaacttaagccaacaagccccgtgacatgcatgaaggcgtggggctcggaacgcccccagacaacacgcaggcagggcatgcagagggctgcaggtcttgaccaatgggaagatgctctgtgatctcagtgatctggtgccaagcatcacagatcgccacagatcaaggtgcgaggtacctatcgattattagatagctatatagtcactcgttctggaggactctgggagttctccggtaagcaatgcaagcagtcagctacacctactgttgagacaattgcttgtgcagttgttgtgaaccctttggcttcaccgaaccttcatccgtcaagtgtgttgatacctctggagcccctctcagtggttctgggttaaagatttatcagcgagccgaatagtagagaggttggcatacaaattctatacaacaaacccactctcctaccaacattttctacgcaaagtacagcagagttccaccaggcttcatttagcgtaccgcttgccggcacggtcactcttgttcaactaggagctcgacggtcctgggaagcgggggcgccatcctcatcctgctctctgtcgtccggaacgagaggatggcgttctccgtcactcgttagatcgctgtcgtcatggtgatcaggatgttgagagaggtggcagctgccggacactgaagccatgtctctgtcaccgataacctgctccaggcaaaggtacggtggtggataacagcagcgtgtatgctcgctgccccctctgcgaagagatctactaccacggcttctccggctacgctgtccgacaatgccaccgcgtttctcactgtacagtaccacaaggatatggtctcagagaagtttaaaatttcgctgttttgtcgctcacggaacccgtagctagggcgaaccgggatagcctagtctccagttgaggcacttggtaggtatgcgcggaaaagggctgatacgatttaggcttagcggtaagggtttagtccggcctggacaaaagtgctatggcaccaaggctcacgagcagtctgcaggatgcaagatgctaagggtgatcagaggcatagcacgacgagcacgttgcaggatgcaatgtgctaggagtgatcggggccatagcagggcgagaacctcacggtcccgggatctatatatacggaggaactggctggtgtagatagacagttccgcagtatgcaattacaagtcacaatcgttggtatctagacggttgtgatcgagacaagccattggtgtacactggttagctgtaccgaaccaggattgttcagaagtgccttcaaccggtatccctttcagaggttctggataggggttcgtcacatcggagcctgggcctaagactgggtattagtagtgttagtggtagctatagcgtttatcttgatgcctttaacttatccgtgacagagttaaagtgattatgcaacgtgtgacgatcccctatctagaacctctaaaagggataccggttaaaggcgaacttctaaataatagatcggtgcagctaaacagtgcataacaagatgtcttaatgtaaacacttaggataccgtgaatacaagctgtgattgcatattgcggaactatctacaagctatctagttcctctgtatatatagacctttatttccctggattattcctttcttcccacaatccatgcctggatcgttggatctttaacataatccaacgatcccttattttccctggatcgttggatcatcgccataatccaataatcgcttcttgataggtccgtctatcctgtcctccgattagttacatttctctggactttgattggtcctaccgccgggtccttgccttgatgttatgacactacttctttgtcttttgcagggcatagttccctatacttaccttccttcggtgccacctcacaccgtcgtacctcgcagtccaaggaccccagagtcttcaggtaattgcttccgacctacctggaaggcatacaactagcctgccggcgacatatctcaacagatactattgctgaacggtgagagtatcgataagcgataacttcctaatagatatacggctttataaagcgcttatagtaatcctaatcggtcggacaataaaatttcttttattagctttttattctacgagagggctgatccaaggcttactaccgaaggttctcaattaacttccctatacctcaccgcctacaataataatataaaagtatttcaggctattaaaggaagcttagtgccggaggataaggggccggctaatactaaaggactcgatactcgaactacaaggctccccgtcttcaccaaggcacaaaatataatggtattaccctcccgaccgtcgacttcgataagtacggtttccactgtgcagcgctatagaagccataaaagggaatggaaaggcctcctatataaggctaacaagaacggcagaaatattcttcacatggttgcttggggggtagcacctgaggcggccgagttcttggttcacgagattgtgagagagaggttgagtaaccggttgattagggagaaggattataagagtagaacgccttgggatgtcttgaatgggcagctctccgggggagataaggatgaaagagcgttgaggagagcgaaggctgcgctggaaaaggcgggtgtccacttggatgcagctcaagaaaaggacgtacagaccaagatactacctaaagtcgacgagcaacacgaaaatacaaacaatacgccgaatactactccacgccattaaccacgcaggagcccgtctcaagttaggtccgaggttcaatctctatatcaataacgggaccgttctcaggataaaacccccgacccagatcaacgacacagtcggcctcctagctacaacaataactgtgatcaatccataagagataaccgaaatcatccacagggccacacgaagcatcgatatagcagtcgatctgagccttttggtcaaaaccggcaataaaagcaacttcagaatcaaaagggccacctcaaacctccaggttgtggagatgagggctggtcggtgggcaataatgacagccgccgtataagattcaatacacctacggaggacgccagtaagaataataccaacagaaaaaacctatggcccccaaagatacccgtccccgggccgccagacaagataggcagataataaacaagattccgagtggtaaagtgatacccgacactgccacgagtgataaagtaagcggtgaaaaacaagacttagcactgagaaacaagataataaatacccgggtcgttcctttaaatcagacgaataagtcaccgccgagtcgagatgccagaccacccagtccaccgcctccattgaaccagagatacaagtcctcgaatgcctcgaaccgaaagattaaagatgacacacgcccagcctcgatcaaagctgaaagccaaaggaagcctggaagtgaagtcaccccgggtgagactgggtaaaaaaggaggaaagctgggagggatacaccatccaaagttgggcattaaaacacagccagggagagcaaaggggctgctgggaataaacaagactcatgcggtgatcttcggaatgacaagcggcagacaaaccacagttttatggcatcaggtcctgagtttggtcagatgcttcaggctgagcctcatattaagaagtgtttagagagtgttacacctaggtctggcctttgtggatcagtgggattcaaatagcatagaagggataatacgttagataagagagctctagacgttaggttggatgaccaagaaatggaccacatgtggatctggtccaccaccaccacaccagccacacaaccttgttcagattacccctgaatgatcacactggccacaacaagactaatattgcgtcaatttctatggagttataccaaaatgtagctcaatcactgtcagagtcagacattgcatctgcttctcgcttgcgcctggtttaaacccgatgacgtgcgctgcgccgcataggctgggctggctctggctgctccatatcctccttggctaccacttcttcctccaccaccctcccttcaatgcgggcctcttccagttcacagagcctcacaaacttggaattcgagttttctctattcaacttacgcctttttcttgcctcctgggccttctgggcgttctgttggtgccttgccgcatcagctttgtggatggatgcctcagatctcagtgtgagtatagtactggtgagagtccttgccgcaagccgttttccggccggcgtatggttcttgagtaggtccctgaccttcttagccacctaggaatcccccacgatatagaaagtaggtgtttttgaagagagatccaacggcaccacagggactaccacctggcttaaaaagagcggtttgcgcctacgtatgggccataatcctgtcccacgccagccaccggcaatattctctttcctaaagccctacttacgggcaaggttatatagccggactaaatcgactttaccgttaagcgtatagttaataagggcgttatttataaccataagcctcttatacgccttctttacactagaaaagcagttaatatttaagggttaaaggacgtaaaagtagtaggggagtaggaaaaaaaagtaaatataacttttatagtaccggattataaagttattaatagtatataagctatagctattataaataagaaaacggtattttaataaatctttaggtttaatccttaatataaaaaccccttttaactaattaaaagtaaagttattactaatctaaccattatctaatatagttatatactagtctttatttaattaatccttaaactattacttttaaaggtctttacttttaaagataactttaaagggaaggacttttacgttttataaaatatatttaagtatagtagtttaggtccttcttccgttctatttaatatatatagactttttatcccgcttcgaaaacctaataattaaaccgttctttccttaactttttattatacttactttatcataattatacttatacttaagtttaatttaattaacggtaaaatataggttaaaaaacttaataatattcttcggggtaacttcgttaactctaacgtaattaattttcttctaacctttattttaatatcgggataacggctaataaagtaggatacctaatacttactaagggggttaggatcgccttatttagctaataaactagctactaaagcctttatattagtataggtaagagcgtagctaaggctttcctaacgaaggatccattaaacaataaagtcttcttagccgtaaaaaaatcgctattagttttcataggcaaagttccttagtagggtaccatcaatgcggtgctttagggtggaacgtggaatcccgtgcttgttggacgcttttcgctagcttataccagcggcaatatctttctaagcatttaacatcctcctcggtatatttggccattggtgggtacctggagcaaaaaaaagtaaaagaaaagcttcatttttggtctctgtgggtggaatataaaatgtgtgttgatatcggggggctttcggaggtccagagttgtggagggtttaatgtgggtagatggcttgggtagttcaaacctacctgggccacatccatatgtggtccacttccttgtcatccaacctagttaatcagaatcggaatgtgcagaatactaacattataaaaacaatattatttaaaagacataattgtccgctacagactctactgatttctttgtgtctacctattttgcttctcgttattgttccatgaaacatgaagcatgcgatgtgtgatttcagcaggaggaatatacccccatggggaggtgaggctctgctgccaaggggggcgcagtcgtgctgttcccccatgatgtcagcacaatgagccgccaacatgcttgtcaagggccagctgaatccgaccttggggctgagtccacaaccgtgaggacaatctgtggaagtctaaactgtaaagtatcctcggatttccacctctacctccgttccggtcatgtacatgtttacctatctttcctgctcactccagtttcacccaactcctttctagatcactcccgttcttcagtacgaaattcgtgacagccaaagcatacaatgttggaccaggtcatcatactacaggattccgcccagaggctctcaacaacctacaacaccttgacctaccaggtcctatgcagtgacagcagtctcagggatcttttcagtagcatcaagactgtctctgtagcactggactcgtgcagaggtcttcttgaacagctcaagtctggcacaaccagcattccgatacccacagatctctccccgcgtcttgaggcgaacctggaggagtgcaaggaagcctttgcggatgccgacgagaaggcaaaaaagctgatgccccagctcggtcagctcggttccacgaagctgtttgagatattcacgcctgctgagatatatcggctgacgagtcagctatatgcgaggggacgggagttttatcgggttggtcaggctattaggttgtatgttgacccttccctcctttatcacattatcacaataacacattaccccttctacgcattaccacattaccacattaccacattaccacattaccacattaccacattaccacattaccacattaccacatttccacaataacagattagcacattaacacattagcacattaacatattaccacactaccataacactatattaacccctccacgcaacccgctgagccttcatacctattcatgcggttttgtactgacgtgccatcaacaacatccagacaaacaacctcacaactcccccaaaacatcctctccaacgcccgacagccattcggccagcccctccaaatccgaggtttccaacccatcgttcaattccaacccccgagattccaataccagcccaacaacacccccaaaatcaacgagaaatcccaaccgaccgggcacaccaccctccacgatctatgcgccaccaccggaaaaaccaccaaaaccactaccgtcatcaagtccctcctggaaaaaggagccgacccaaccgccacactcaacgcagcttattcccagttaacagccgtacacatcgcctcctaccacaacaacgtcgccgcgctggaagccatcaaggacagtatgacaactatcaaaacatttatataccagccaactaccaccaggtacacccactatcagacagcccccagtaattacacttcctatcagcctacaagttacatcgggcagtataaatggaagaacctgctcaaacagaaagatttccagggcatgacgccccttcactgggcagcctatggtgtctgtcctgaggcgacagaattcttgcttaaagaggtggaggatgctgggttgaggcaagaggtggttgatggcagggatcgagaggggaggacggcgttgattgttctggcgggggggtataagttgcgggatagggagtcggtgacaaagattgcgaagggacttgtcaaggcgggggcgagtttggatgtgggggataggagggggaagacggcgagggggatggtggttgagcttggggttgagaaggaggcggctgggaagaaggaggaggagcagacgggtggtggtggtggtgtttttgggttgggttatcaagggggttatcaggcttataggtggcagggttatcagggaggggggcagcagagtaatggtttgccgggttggaggggaaatagctatcagggaggaggttagacaagtgggaggtagggattcaaccgttggagaaagtcaatctgaaaagtgtttttgaagccatcaccaaccttatcgttgatctcgggatggacgccacattgggaccctgggtgaaatttgccgagcaagggtctagttcagctcccagcgctagcagggattatttgcagatcttgtccccgcaatctggcacttgagaggcaggggtcattcccttgggttgacccttgatgacgaagttcttgtcggaagaattgtgaggaaacattttcagagttgaaaagcaacattatgttgttaacacaaacaagcaagctagcagaggtatcatagtcccaataaatcacaacccattatccaccaaaaaaactaggtactccattatcccaccatcgccatcactccatcacccacccactctactccttctgctccacaggcacaaccataacctcagcagctttatactgctcctgaatctcattctggctctgctccccagacaccctcagctcagcctccttatccatctgcacgatgtcacagcacccgcagcagcacgccaaggcaacatccaccgcgcagctaccctgaaggttgtacttggctcggaaatccgctctctgaatcgccatgggaagccactgcatgcagacagctgttgaaccgcagaatagaaggcactacagatcatgtcagcaacctgtcatccgagagaaagcctggaacataccgaagtgttaataggctcatagcccctcagactagcgctcttgttcaccctgtgatgtgtcctgccaaacacgacacacggcaagcaccaagtcataagacatgtctcgagcggattaacaaagttccagaagttgtgtgtccatggctgagcggtggcgggcgacttggagttgaagtgctcggagggtgcggcgaagactttattgaacttgtctttccactcggccacgtcggcgtcagagatgggaccggtggcctgggtcgaaggggtagcagtggcttggggggcgggagcggccattttgatagaattagaaaataaggtgtatgtaagtggcgtaaaaggccgggtatctttgctggtaaaaggagaagagaaaaagagcgatgagaacgattgtggtaagactgttgccgagaataatagaagaaatgctgatcagtgacaaaggcccttctcccacatcttatacaccatcaacattggtgaccctgactgtccgattaagatgaactgggtgaccaacttgcacccaagacgcccatatcccgcatgtggctggctctgcgacttggctttcctccttgcctgctcacaccccgggcagccaccaccaacaacatgccaccgtctgactcgaaaggtcgcgattatcccggaaacatttctcagtttctgcgagtggttcgtttgctgattggtcctcgaatttgtgaacaggggagagtggagatgaacagggctgccacaacctgcttggcgagttcttcttctaccccggacagggctgagacgctgggactttggagccaagtccaaaacactctagcggctaggttccagccgaacaccaggtcgctaaaccgttcattagcttggaggccttctcgaagttggtgataatgaacgagattgaaggatggataggatgacgtgaaaaaaactttgactatggagtacacccttcctttcaactcccctgacccctattttgcccttgctcgtgtagtaataatcgtttctcctgcacttccccggtcgaactgaaccaacacatcccgcgcgctatctttcaaccgcttctctgtgtccctgacttctatgaccgattgcttcacctcaacttcgtaatcgaccacttgagagccacgcttgatagacaccttgctactgctcccatcttcctcccaacccggaattctatgcttgagcaatgccaacgcggaactcttgtacagcggttcgtctttggtcatcataatcgtgagagccagcagcccggtagccataagtgtctcgaccacaaagagagtcaaccagggccaatgaacttgaatgtaagcttcgttaacgaagacatccccggggatcagggtcaggttggcattgtctccggggttcttggctcgcatctgcgtagaaacactggcagctatgttggaagtaaatatctgcaggtcggtattggcgaggtaatgatcgaaagggataagaatgttcagtccgatgggttgtgccgaatccatggcggctgcgccaatttggtccaactcgacagccattgatcgcacgtacagaacctgtgcaaatgcggtgatgatttcttcagatatagcctcaatcattgtatactagcgttgggcatcgtcctccgccgaatatatcagggttgtgtgaaattgaggagggtcgtcccgaatggacccatccgcggaactgggcgaggcaggcaacttggtcttcttatggagcggtttgagtggtacagtcgtagggctattagttgtatcagaacatctgaatttgactgaacgtttgtgaaggtttgttggcaccagtagaacctggattggtagaggtgaatgcgccctgcatctggcttccaaagtccttcgctttgcgcaacagagaatgaagcactcatcccaccgatgggatctaaatgacgagacataccagaggaaagaaaagtaagtccatctacatcttcccatgtcctaccataaggtaaatcccacttaaaatccacaggtcgcggatctattctggaattggtattcggaaagtctacccagctgtggtcttatcagttaattaaattgtgaggcgaaaaaatctactacacttactatgtaccatttcgcttatcctcgcttatatcgcataacggcgttaaggtaccagttaggtttgtaaaggttgagcaaagccccatagttgtgactaccggccagaagcatcgtgacgcgttgggtgggcaatggaatgttgggggcgagacctgcccaaacatgccgttaaggtacgcaaccctggacaaggcatggtttagattgaaatctttagacattttgtcctgaattttcccttcaccagacgcccataggttagcatcttgaacttaggcaatcagaaaaaacatcggttgacagaattacctacatgaacttgcccacttcggacgcccctctgagacataagcattggcgacccctagttgggcagtggctccctcgagcttggtctccctgttagaaaccttgagcacctgttgtgtactggggtcgatccccaatgccaaaatggtgatcaaagacagaagcaaagcggtgtaggcaggtgatcttattttgccgaaaaagacagaagcaccccaaggtcctcgacttgcttcgtcaaagacttgcatgtttcgcaataggcgttcgccggtataaaagtgccgccacttgagctggcctaggcaggctgtgatagccaccatcatcgaggattttcccagcgtagtaaagatagatataagggcgttcggttgaatagctaatgaccaagcgtccagcgctaggccgtcgatcttgctcaggattgaaaccaccatgacagtagacaggactgtgacggtggcagcacggatttcccaccaccaccacccacgacgagtttgtgaggcgccattgttgcttctaatgaaagttagccatgctttcgttcgtttattggatgcatatactcactctagctggctatatgaaccaccgtggtgctgcatctccgccagtactttgtgccgtgcaagtcgtccctgtttaccttgaaattaaacagacacatttgatggcattcttatcataaaccctttcttataccaaaacaaatctttttttcgaacgtaaagggctgggattgttgtgttacccgagcctcggaccagatattgctcatcgcacttgttgcgggcggagcttctggccagtgcggcgctgtccctgttcacagctaccaattggacgattcgcattttgaatagattgtaggttgctatcagcggctaagaggctcgattgatgcgtttggcggacatcaaaccttcgcccccaatcgatgcccaccttctatgttctgggtgctgaccgggggcaggtgagagccagttggttgccgccccgacagaaattgtcaacattggatagcctttatctaagctgctcctgtccaccatctaaccgttggatatccttcacctgagcttctccccttaatcctgactatccacccctcttcccttaagctcagcacagctctttggcggaaagtaaacgacagtcttgatcatctcggcgaccttggtattattaaccgcattgatatacttgacctttctcaacccaggcggcatcagcgctgcctgataggggcggatatacccgtaaaaaagcgagtggtacgatgtgtcgacatcgacataaactagatatttgaaacactcagtcagcaaatgtcagtcttcttaatatcagaattgggaaatataccctccacctcatccaaaacaaccgcttcccgattaactatcaccgccgcagcagtctcatcccaaaacggcagataagtaggctgattcgccctaactaacctactcaaagggttctcattcaccgccaccagctcatcaagaaatgcctaatccggtatcaccccattagcagaattagccacaagcgtgatgttcggaaagtcagccgtaagcgtaatcttagttacttcagggtcaacgatgaagttgatctgccacccatatcagcatcgagaacctcacttcaacaacaacaacaacttaaaactcacatccgaaaccaaatcggcctgcagaacatcccctatagcctagtacaggaaacgatccacatacccccccatgctatataacccagctatatttttcgcaaagtctggatcaagcctcaccgccagcgcgacgtttgtcagagccccggctgagaatatgctcacttatcctggattctccctcacggccctgaccataactccgctactgagccctctgcgaaactcacattagagtagccataataccccttggtagtaaaagcttccttcgccaccttcttaggtcaccagaggtgggatcatttcccaatttctcatttgtcgtgttttcttttgcaaacacccctttccacggtaactccccatagagaagctcataattctggaagatatacgctgtttgtataagggggtagttagaccccttgtagacgggaatgcaagaagacaaggaggcaatctcgagagaggcaagagcgtggaggccggtttggagagcccaggagttggctgtatcggaggctagaccgaggacggtgtagttgtagtataggggaaggagcaaagcgatgaaggcagtggggttccagtcgttgtcgaggattatctttttctggctggtggttgagccagtgggcaataatagcaagcctataacgaggaataagaactgatagcgaggttgcagcatcgtgactgaagacgagatgagtatatgataccttcgttaagttaggataattaagatgaatatattttttggtgcaaagaatatgttgagggaaagaagtcagatggtgagatattttttgttcgtgggacgataagcatgagtgcgatgctgatctgcatacaagagcgagataagcattccttcgggaataataaggtaattaagagaataacgacgagagtgtgatgacgagtagacttgaaagaagaaatgcttttctgggctgagctgtagatagctgagttagttttcctgctgcttgtgattctctggcatatgcatggggaccgggcctcagtgatcaccttcgatagcacaccatgatggtcagtaacgctaaacacagaatgtaatgctattagtctatctaaatgtctatgctactactccttaagaactggtcctatgttaaaaggccggtcttttcggaagatgtaaatctcgctaatcaggacggcatagcccacgctcatcgcgatcgcaatgataggaagatttacccgcgcaaagttaagccgcctgacgtgaatatgcttcttggccaggatattacgctagagtaacccggcgagagaggcgctgatagctaccctgaaagccccgtaattcacgccaagggctatgctgtagatcgtggcgtagtatgttcgctcgctgatgggaatccccgccctgtttgctgccaacttcctcttctgattcaccgatgtgcttaaaggagccgagtcctagatttcaaccatgaggctctgtcatcaccacctgcataacaaccacatacatttccccggatggcgctattacccccctcttctttttattccacctcttgctgctattccagccactctaaatctgccttgatgctttgcttctcttagacgagtttattttccggcactgcaaggacatgcccgcgtttccgccgctttcacacgcctatgaccttattgcccgcaataccactgccgacgttgtgctaccagtatttgcagctgcagtaactacccctgctctatgactgaagtttttaaacactatgatccaagctcgtagaatccacagtccaagctttgactatatctttcaagccaaagttaaatattattagaaaggtcgtctctttcggtaatcttacctcggcatcaaaatagcggctaaagttttccccagtaaagtcaacttccttataagacaatgaggggtaaaccactgttattatagcttatacaaatacacgggccctgatacagggtctagagctgctagtggttactagtgtgatcctccgagcacagtcacttgtcgtacctgggctgcgaggcagtcagcgagagtttcttcttttttcgctctatgtggctactaagataccttagttcctataagcagctaaagaagtcgtatgactaatcttcccagtctacttgtccgaggtgtcgaataatgacaaaagtctctacaaagttcactctgttgtctgaatctagagatctaatttaacctttgctaagaatgatccataatacctgcttccgtggattggcttgtccttgggactagacttatattcaaaggctagttgtataagtcgctccatttatgtcactccttcattggactcctcggatttaaaatcttgggtttatgcttgctaaattacagttatatcgctctaagagacgcggccggaaataattcgattagctaaaccgctttcgtatttaagttaccctgtaagtatttctagtatgggtggagctattaagaaaaaactttggcatggttgcccatcgaaatgtagagtctaatcccttaaacttctttagtctgctcccttgccctagtgtttaacagttatattgtcttaaagaaataaggctaagctcaccagaaatgctagtatgttcgttactaagcctgggtgatcctggcaggtaggtatacacaatcctgagacctacctgctggaagggaacacctatgtctataaagtcttaaagacatccctctctccaaagaacatgaagccttatccccatcactcccaccacactcacctacccccttcaccatgcgcctctccaccctcctcctcgcttccctaaccggcctagctaccgcaaacttcgacctctacctaggccaccaagtctttggtgtcgatggcggcgcctaccttttcgacggctagtatatcttcgataacgaccctaatatcaacgacgttcgttctttctccccttttcatcccccccctcttttcacaactaactaccccctccttttaggtcttcgcctacggcccctacctctcccaagacgacgtctcaggccgcacgattggcgtgcgatgtgccggcagcggctgctacggcggtgccgccactaacattaacgtcctcgagatgcatttcagcaacaatcccctttaccactggagtaagtcccctttcccttcctccttttccccttccacttcatccagaaagccctggctgacaataccccccttcccccccaaagccatctacaaagacagaggccatccctacaaaatatacggcctcgacggcagaacctacggggagtacatcctctttcccggcgttaacttccaccatttgaggttcgccgagacccggagcggcgtccgcaagtttcgctgtttaacgcagtttactgctgcgcagatcagggctggcagataggtaggtagggaaatttctaccactctactaagagagggagtgatgctctagtgaatccaagcttgggaatactacgggtagatagttattgttcctagaaattaaatcaatggcagaggcaaacatagactacaaccttaaaagctctcaccacactgtaccttggagtcccgcacgctacactttacattatttcgattactacagctcaatctagctcgataccctcatttcactcaatatccaggctatccaagtttcatatatatattacacaattatttatatctcataaccaaaagtcatcacatcataaccaaaaactgcctcccacattgatatacagcccaaaggaagctagaacagagaaatccgcaaccaatcacatattccaaaaaagatcgctttccaaacgcccattatccaaaactcttctttaactcgcttcgcttcgcttacttggttcaaatggtcgctcaagtcaagtagccaacatagccttcatcaacctcggaggaggacctgtatcacatcaaccaacgagtcagcttccgcatcctcaacgccataaaagtgaactgcagttaaaggaaaacgcaccgaatccggcaaaccgagcacccgttaccggttcctcggcacgctgatagacatcctacctcgtttatccttctcgattctcactcctcccctcgccggctcctcaatcgtctcaatttcttcctcgtatagcaccagctcgcctgtcgacaactgctccgccctgaccaggtcgccgcggctgccgtggcgcgagtgcctggactttgatcgttcgcgacgggctagctgccgttccagatgccgaatctcggatcgcaagtcatcgttgtcatcgtagcgccaggtatcccgaggaggctcaacaagcgccacctcccgtgggcgagcatcgacgattactgtgggcggacccctgggtgtgagagaggtgtcatatgacgtggttgtgccatatgaagttgtgtcgtacgaggtggtcgtgttggaccgtgccggggactgctcgcgaatcgtggttgtcttgaccacctcgacaggaggggctggtgcgggcgcgggctgggcgttgatgatgataggaccgttaccggctggggccggtgggtgttgatggtggtagtgcacggcagggggaggagccgtggtgtggtactcgacaatctctgttcgacgttcctcaatgatatcaccagcgctggatcgcgcggccatgatctccaactcgcctgggaatgttacttttttgtccgggtaggggagtaacggggtgggcgtattcttcttgtaatcatcgctcagattcagcaagtcgtcaatactttatatcaagcagggcggcacctagatactatggtaagcagacggatttagactctatgttttgggtatgttaacgtacggtcctgttcccagaccgcaaccaagacttttttcttccagtagttatagctttggtgagaaattctgccatctcgcaaagccctgcgaagcctgtgttgatttcattggcatgaccttcagcacacgctgctcgtatttcttcttaatcatacgtgatagctcccatgatgatttaactgcagtcaccaagcccgcaagagcggcagctgatgccaaggaactaggaagatatgacgccatacgcgaaaaagtaaggtgttagctatgaaaaatggaatgtgggtaagttggggtgttagttaagacgagtagctgttatataaggattcgcctggactttgattcacaaatgattcgaacttaaactggttaatttggacatttcggaaatccaatattaagctgacagggccagggtggcctcgctcggtaccgaaacccagtcctcaacacaccccacccaaattggcaacggatttccctcgaccaggaagaacatttccttctaattgtttggcagagctacaaacaaatacacgtctataagaagtacttcttaaccattgcatcttcccaccacgccagactttaccgattcagccaccttcttcaactgtcactatacggatcaaacttctcattgttcttcgcatcagccggaatagccttgttcagagcatcgccaaaccggtccctcttcaaatccatatgagctctcccccaattatgattcagcagcctcctattgaactcgcacggcatcttctcgagcgcaatcagcggcgcctgtgaccacttcttggtctcattttcaggagggtcatccttcttctctgccctcctccacgaatgcgtagtccacccacggtgagaaacaaacttggggtgagtcccgtcaaacagcacccccgatcggtgagcagtggtgtagtttccatgggctgaccaggacacaaagaagatttcgttgtggagagcccacacgataatgtgctcccagtcgtgcgtgtgtgaaccgccgaggaagccttcgtccttttcgaagtagtacccgtagagataggcgcaccagtagtggttgcagcgggtgcggacgtaggtttgggagcgggcgaggcggcctttgcggcagttgccattcttgaaggggacgaggccttcgttgagggtgtagccgtctctgtcgatggcggcggtggggtcgcaggcgtcggtgtcggcgtcgacgtagggttggaagtcgatggcgcgctggtccgcgttgggtggtagggggttgaggaggtctgcgcctgcgagggcgaaagctccgaacaggaggccgatgatggagggtttcatgttgagaggatgtgtctgaagttacagagacaatgagaggtgtgacgagaaggatactaagatttgtgtgagtgaaactgatgtcttttatacatcaactggctttgacatgattgtatgcaatttgctgagctaccttatcttcgcatatccctttcccgtcgcctatgtccgtgtcaacatgccatctagcatagtggaaccgatactacagctgcttagccacccgaaggatttgcccgacgataaccgtggttggtcgagatcataactcagagctcgcttgtactcagcgctgcattgttgtcagttcatgattgttgcagcagcgaatgggggataaggggctgagttgatttgctgacattgccgaaagcacgcatgcttacctcggtttactctggacctttgttgtctttttggcagcggatatcgtcaaaagagatgtttacacccgagaaagaataagtcatgagatatacctattcatacaggctgaaggtgtatatatcagcaacacctctttccgctcaacagcgtcaagatcgttgcgagccaacaagtttccacactcttcctacgactcaaccccaacaacaacctaggactctcatctactccatcacgcttatttcaaattcaacacattcacacaatcacaatgcacctcccccaaaccaccctcctccttctctccctccccctgaccctcacccagcgcacccccgaagaaaacctcatcctcgccgactgcggcatcggcctgggccacaacggcggctccacctcccgagagatgatctactactccggccccgtctggaccggcaacggactcgacacttatcgcccaaagatgatggtcaacgtcccctggaccggggcctacccctggggtcaaaagggaggcgtctccgccaccatgcccaacggggatgtcttcacagtgcacatcaaccccaacatcaaggacccgaatgccgcgggtgacgcgtggcataaatacgagctggaaaagcccttgaagtgctactcgtatcactatgacaaggtttaccggctggatgatgggaagtggtgttcaagtgcgtatgtttgtaatcatttggggaggccgtatgtgcctcccaagtgtgatgcgctgtgaagggggagtactaaacttatttggtgtggagagggcgttgttgtaaggacaatacccaagtactttgaggagaatgataaacaaataacaattctttttatttcttcgcaataccgctgctgatcatacgtgcgctgctaatcgttacctacgcaattgaatctctcacctctatctccttcctacatgagagttatgccacctcagaaaacgaggtgattcctccctctcagactcctcttcctcctttcacacaggtggcgcatctgccatttccgcatccgagtcctccattcccacgtctgggttcccccgcttcacattcccctccttccttttcgcatccccttcctcctttttcacaggctcttccggttcaggagaaaggttgcacaggctctcccaacctggttctaacaactgttttgcctcatgcgggtcgtctttcgcgtcacgcaggtcgtctttaggcttcactttgagattcccacgccgctcctcaagacgtgcgactgcatgccatccttcctcctctgagtcctctctcacattcttgttgtcatactgcttctctagacgacggttgaaagctctgaacctgccccttgtatccgcaattatctgctcttgtagcgttggaactcccgctgtaggtgcgatcgcgttgttctgttgcgcttgtggttgcggtagggctaccggtctgtgtttgcacctcttctcgtgatcatgtcgatatgaatcggtgaagaagactcctggacgagtggaagattcgcaaccgcgccagcggcaggaaaaacgttcactcatgtgctcgtaaagcgtgggtggtccaatatgtctgctataacgtgacaactgcgatgagtggtacagtaagtttgatgaaagagagaggtccgtttcgcacagaaagatctacacagatcttttgatgtaatgctgcaaaacaagcgatgagactattgataagaaactgccatatgaatcctcgacgaatccccagagtcacaagaagagggggttgatgaaaaagacatgtgcaaagtcacgaaaaggaaagtactgctaacaaggcctcctggactttcccagcttttaaccagaatcatatctggcgatgggcttcccggtttcccatgtgcagctgtgtggaatgagacctctcaaataggccataccaccacctacacctggagttcttgggatgcgcaaggctgcccctgcctgtgcaccaaacccgcccacagggccaatccccagtcaacaggtcaggtggtgtcaaactccaaacaagtcgaaccttccttcaactattcatcatccaactcccgaatccgacacccgaactcctccaaccttgctctttcctcccgacactccccctccctctcttcaagagctgccagccgcctcctgtgctcttgcttccaatcctcaacttttgccttctgcttcgaaacgctgcggctgaccacctcacttgagcccccacgtgatatcaatgctccaagtgacgcagaggaggcacctgacttactagatgagacccttggggggtgaagcttgcagttgagaagataccgttcgagcccatctttactaccaaatgctgatcttttacctacgcgcttgcaatttgggtatgggcactcgaaactctttgctgtgggagaaggcttgtgtctgttttccatgtgcctcttcaaaggcgaccgccgagtgaagagtttgttggcttgggggcaccctgggacaggacacacgagactctgttcttcggtagacctaaagtacatggttaaacacgcgttggtggacggtagatggtaacttacaatgtaggtgcatttgaaaggatatcgttgcctgctccagcagaagccaaggttgcagaatggtcttcccctagctattcgatctgggacaacacagacaccgggttctcgtggccttcaagttgatccgctcctgaagggttaatactttgttgaacgcttccttgtgcaattgcagacatattcgagggctgcctctcggaaatacatgttgaaaaccgaagttctctgtaacccagtctatcgggggactaactccagaaggttggacagacatattcattatctgcgtttgtagtggttgaaggctgggttgcgcttcatagccacgaccaggctgtgattcccccaacaatttgataatgtcgagttcgtttgaatcaagtactgttgagaatcatgatcagcttacgttcgaatttggggtaatgattactcaggtagtcagtctctaaaaacctttttgtctcatccaagaacggctagcccagaatcaggctcgcttcaccctcggctcaccttcgactcacctttagctcaccaccgctcactctacgctcaccattctacaaaaaagccaactttacgcgacgctctcatagtccaaattcggagcctccctctcttacggggacgaaaatggggctggatagagagggtcccgtttttaggccccctaaaccgctcctctttacaacctccaacctcgacgccaaccgtacctcttctatttcttgcccacatggcccccatctttaacctgtttctccgccagagcaggggcaatctggacgggcttccccttggcaggcgcctccttctcggcaagcagcttcttctccttccctccccagtaatgccaatccatgaagcggtagccttgcacgctttgcgcggcggcattcaccgtgtggcagccgaacaagagaccattgggcggcctgacagccagcgagaagcgcatgaaagtgaaggcgtagacgatgagggcgcaggtcatcttgccggatattctgccatctttgttaacatgtttttgctgctaccattatgagtgaggaagtaagccgaacactcacaaatcagggcttttctgcgtatcggctatggccgcgagagggatagtgaagttggaagccggcccccagaaatctgcgcgcatcggagcctgtcagtttcgatattgaccggctacctaaggtgccttccttggagagacttacgcgtcgagcaaaagtagtcggtccagggatgggacctgatcttggcattagccgccttgacgaatgccgctgccattgtgggtggtagatggaggtcaactttacgtgaccttgaggttcaatagtgtgaggttgaaaagatgatatacccaaaaagcctcccgtagactccggttcggagttaaagaggggaaatatccgtggtgtcattcgcgttacacagccaagggaaagaacgcatggaacttgcgagcgttccgacatcaggtccgcattcctccttctctctctctctgcgtcacgtggatggctggtcatggactcatggattggaaggaaggcctgacaggtttcagctgtgatggaagcgctttcttcacagggctgtgccagctctgcgagtctcgtcatgaaaagtcgactgaaagagatttgacacactcaaaatgggactgggttgcggaagtatggttttggaaaatgctcttggcgttgttttgcagccttcccagtggttgtcatcgctggggagcgggagagcctgaggatcgccggccggccgtatgcggccagcccggctggatttagaggcacgaccaagagctcggcggctactacactctcctgaactgccagtctggttgaggcgtacacgtcagatgttttggccgtcattctttaactgcaatatgtcttttcttccgggcatattgttgtgccaatgtctccagagttttatctgggtacctaccacgggtcttatgttgatgttgagactgtcttgcgtcacgggtcccctgttttcttgcagcttttgccttctggcttctttcatctgcttcatctaccgaaacataattctcttgttaatacgacaagatacaggcggcatgcgactttcattctgctgccttcttgttacagtctgcgccctggtagcagcagcaccggagatgacaatggagaagcttcaagagcgggccctctgtgtaagtgcaaagcgacttcatgggggaagatatggatcaaggttggaattacatactgatagccatcgcacaggtctgcaacgaaagccgctgtcgtggcccggcttgctgtgcgaacggaacatgctgataccggcatcgccaacccccgttgacaggatcaaccgagcaatgaaatatttacgactgacgatacacgttacaatgacttgggattccaccatttggagtttggaaattggcgttttgataggagttgggcaacaaaccggcggcacgacgaagggtagacttttagttggatcatgtacaaacaaacatttgggtccttggactttttaaatcaagtacgtttcttcgaagcttcacacgacaaaagttgggttagacaatggtaaactcttggtgaccatcagcaaactcctttgccatgccctctccatccatgaacccattcagatacccatcacccatgatccgatatttgcccgtctcaataccatcctctctcaaaacaaaagggtagtcacctccatacagaaccgccactatatcccctggctgaactgcctcgacgccccacccataccgtcctttttctgtcacgaagaatctcctattgtagcaccacttggaaaacgacccttgcaccatccagtacccttcttccaaccgctcagcatatgcaagaccctctcccagtgtcatggcattgagacaattaacctggtgtttcacctgctcccgcaccagactcctcagcgactcctccccgtcatcttcacacagtgcaatcaaaagctccaagcccttggcaaactctcctgacggcagctcgttctctctcgtccggttgcacatgaaggttctcgccaaagactccagttgggcttggtgctccgccactgtcacttcagcggctggcttgagagcgatattggcaatactggtcactgaacggcgtgtgtctgtctcatcgaggtttttgtacatgtcgttgcgttcttggacagaagcagacgcgttggcggggaattcttcgctcttgcccttccagccgcggtcgtatcttgctgcgccgggtggagggatctgcctcaccgtgtcgatgatggcgatgcggtccaacactcgccctttgatatgcagtaccttttgatctggtgatatgcggtagatggcttcgtcatgagacgtaccacaggcgttcgcctccaactgacggatacagaaaggctcgacatagcctggtcttgtccagtctggaacccacgagggcaagtccaggttggagggtttgttatcagagattgtaacgcagtgagacagaatctcaagggtcccagcttcaaggaagctaacggcgagctcggtgaataccttctcggggggcttgttgtagtccaccacgattttatctttgtggtctgtcaagttgagcacgccgtagattttgtccacaggtagtgtgctctggaagccccgcatttcctcgagcacttcaagcacgtcgcacggttcatacgacgcgtcatcgagtgccaactgctgctcgtctctcagattgctcatgatgcttactgccttccatccccagtgcccattcatcaggctgtccagcttgaaggacttgagaactctgatgacggggacaaaaaagtcccaaccaaaggcgttccttcccgcgtacaacattgcctgacgggcataggctatctcttgcattacccatgtgcggtgccactattctggtcagttacggggtccgttgacttccaggttggattcaggtctcaacatacccaggaccggttgaagaattccgcaatcatgtcccagtccagttctcgggatcgtggatggcggagaaatctcccttggacatcatgcagggcgccagccaagctatccatttcatctggtgctccgatgtctatcacaatatcggtcatgagatagatggtgtttaggaagggcatgacgtaggaacctgaatcttctcccagccacaccctgactgtctcggcgccggcgtagatctcgctcatgactctgacgtgtttactccgctcatcagtgttttgctggtcaatacatacggcatccacccatattctcagatccccgtcctgaagtctcatggttctcagtgctcgatgaagctctccgcccaccatgacacgtgtgtcatcgatcatgatggggcccggtgggagcacgccgcccaactcaaggtgaaactggccgtagacaggatggtcgagcatctcggccaaaggcaaagcgtcactcatgctgatctcagagccgctttcatcctggccaactaccgcggtggtgatgacgtcgtccatgggcgatgttctggtaaggttcacgccacgactccagcagtagctgagagcatcgtagggcttatcgtttggctcagacagagacatgtgcgatatgctagccataagggggtcattgtagcgaccaccaaaaacggtcaagatacgtgtttcatgaggcaggttgagcgggcggtagggatattgtgacgccatctgaaagtggtgagaaaggacccgaactgatgtcgaagatatcttgtgaggctgtcatttggcgagacatggcagggtgttgttgacacctgaagtgggtcgctcatttctctcatggtagctggagcatggagagcctgatggctggtgaatcgcttggctgactaggacagcaaaacggtaggttggaggagtattgaacgatccaactgctaaacacatctgatttccatgttccatgtaggtagtaggcatgaaggagcaatccgaagagtggttcaccttgtgatgttctccgaaattctgtcccattgaccccgcaattctccgcatctaccccgcatccccgcaccaggctcaaagaccgtatgtggggtagcgtgtttgagaattcatgacattcacgcttgcaattgttgagcttttcctgtgttttctgtggtgcgaggcggtcaccagtcagcaacccaaacaagcccacttgagccgggttcagtcatcaaccagaacccagtacctagatacatgacttatgcactttcaatgaattggggtcgaaggttcaaccatggagaagagccgagagcttggagacagaatccgagtaatgtacactggcaacgcttatctcacacgtcaacaacctggaacccacctgaaccagccacaacacggcccaactactatctgcacgtcgagagccagtggttggaagtgaagcagacaatcaagttcgtcgtaggtaccttagctcggtatcaaagggatggtacgtaggacagagcaaaagaaaaagcacagctgaaagtaccaggctgaagccacaaaatacctacctcaaactctcaatcttcatgcataccgaatctcctctaaaacctctggttttgctcgtggggtatagctgcagacgttttacttgcccaccacacagcgtacctattaaccacgggatataaagaccagcacacttgtataagtagacctctcctcgccctgtatgtagaataagcaagtaagcaagcaagaatacaagtcaataatatacatgcaccaaaagcctctgtattagactaagtacaagcactcaaagcctctgtactgtgacgtcttgctcactgtaataacagtggtcttgcttccttcagcactgctgtcgtatcctttctctcacttccgctacgcactgctacaagcgcatagttcgctgtagctcccctgtaggctctgtattacagacctatagggcaacgcagcaaacagatattatacgggaaactgctaatagtactatttttaacggtactaaagatataattatcgctgagctaaaaagtaatttcattctcctataccccgactacgagaactatcgtttaatagttgtctactatgcttttggtcttggttttcgatagtttctgaaagggaagatctactatatcccgtttcccaatcttataaccgatactacctagactcggcttattaataaagcgacttatctcgcggtcttaaatcttatagaagttgttcagatattctacaagaatatcaccctcttgctgctctctaacccgcagtttataatagtattataagccggcgaactagagacgcgctcgggagtgacggcttttgagaagcccgaggacgatactagcccgaaatatccctgcgttaagatctgtatcgccaacttttatatgtacgtccagcgggacctgtggatagtatatttaatcgccatcctagccaccatcgtctgcgttggcttgggaaccggggctctggcgcaaaacaactactacgttagggacgtgaaagtctcttctgtgattgcagccacgagagtgctgtgcttggaggagctgccgtggaagacgagtaagtggggcgaagtactgtaggagattaaggagacgaagctggggtatgggattattttagaccgggagagcgtaggtacgctgaggatcggggttggggtgagaagggctgatactagttcgacggagggtgggacggtggggaatgggaaggtgtattatgggtttgcgcctcctgaggtgttggaaaggacgaggagggagatgtttgggccggggagggcgaggccaaaggggagtccattttcgtttaagatttgggagcattcttagttgtttgcctcgggattctgtttttatggtttagtgtagggttatcatagcgaattttcagctgagcttaagttaagatccgctatagtaggcataaattttataccggaacttataaatatttaacgtatttgataagcgagcggatcggacaagcgagtggatcgatttccactaccctattacaaccatcctcaattgcaaaacaacaacactattaacctactacaattacatcagaaacagctgaatcagactcttctgcaacctcctggcacgtacggatattatggccaggcttgccgcacacaccacagcactgaaccttcgtacgccctccccctacactaccaccaccctgctcctttccttgcgccacctctccacccacagccttctggtccagtagatcctgtgcatcttgcacaataagtgatcctccaagctgtacgcgtgttttttttgctctccggcgcttacttagtgcctcgttcgccttacggagcgaagatacctctaactaaaggagagccacttagtgcattacagccattatacctttaataagctggtctaccgcagctaacattaaagtcggggagctattttaatggttagtaatgcgagtcttaataagcgttaactataagttggcttctcgggggttttgtggtgtctggaatacctaaggtagtgccgtgcccggccttgaggatgggggtgtaggcgtacgaagctttatatctagcttagaaagtaccctctctggatcgtatggtataaggccagcacccgcaaagctaccctgtatattcttctccgttatagaggcgaaaaaagcctcgcggaaggcacagagaaactcgaacttacttacgtggttgatatgcatgcgcatcaagccctcgatctggcggccgtacgcctgttttagcggcccaaagcagccaatatcgagtggctggaggaggtgggaggagtgtggaggcatgcagagcgtaataatattgttctgctagcagtggcgctcgaattcagttaagtggtggctttcgtagccatcgaggatcaacaaccggtatttgcccttcgtacgggacgctatatgatagtcgaaatacttaatccaatctaggcctaccggattagtaatccagccattatcggtagttgcgatgcgccaggtaaacggtaaattgcacttggtatactagttggtaaggtggtactatacggctaagataataaagggcgggatagcctagccgagggcattgactccctagattaccgttgcccactcgcggttaccaggctaggccagttttaccttactaaggccgtccgaggttataaccaccatacctacgaaaataatgcccatcataaacccagtctcgtcgaagttataaatatcgttatctacaataccgtatttggccttagtattccgtacgagcgtaaaccactcggcaataaccttcggatcctcgcacttggccctctggtagtcgtatctacgcgtaaaacgcgtacggagctgtagctggcgtttaacgaagttgtgtgcccagcgttgaccaacagggggcgcgtcgcgtacgcgcagcagttagttagccatatcttccacgccacttaatctaggtgggaatgcgcgtgcagatagctcaagaacgtactgaactatcgtcttctcctccagatccgttaaattgcgtgagttggctggaatatcgcgtcgtgcaggcttaccagcgcgccggcgatggagggtagtataaggcacagaatagagcctcgctgcagctttgaggcttagcttagggtcatttttaagggcttcgagtgcaagaataacttttgcttcaactagaatcgaagacatcttggtatggtggaggaaatcgatgttgcaggtagagagctatatcgcgtacgaaatcgatccactcgcttgtccgatccgctcgcttatcaaatacgttacaaagtttatactctacttcctaatacgaactgtagagatgtgttgaaccgtgtgatgcatacgctagataggtggtctcctatacccgctgttgaagtagagatgccatggtacgtggaagccaattcctggcaaactttggactgtagttggcttaggacggcaatgacttcagggcggtcatcaacccaacagaccaaggttccccttaggctgagtacctatactatcacacgctttctgatggacacccacgactgccgtgcaagtccagtgcaaaagtgtgatataagaggtgtcaggttctctcgtcattgccgtttcggaggatgcacagctggtcgacccacggtatgttaacggttttctatccccctggttgagatgtagtggatcgctgcgttgagagatgcggatgggggtgggagagggcggtggaggtgggagggaactaaggacatgctatgagtggaggctgaggggagggtgcggggttaggtgagggaggactgggatggagggttgaaggtgagagcttgttgtttggtttcgccccactccgccgtccggagttctcgtaggcgttgagcctgacacttctgacagctgccgatccagttgttcaaaagaacctgaaggactagtttgtcagggaaagtgagctttgccgggatgaggagatatgtgaatacgaagagaccccaatatccaattttaaagtgcttaggacaagctagatatcgagaaagccaacaacgccggcttctgctgcaggcgtggaggattggcacgtcactgcatggcatgcgtggtgcgggggcggctgacccagtttcacggttccacgaagaaaaagggtccttgcgacgtcggcctgctgccgactcgattgccgatcgccgggagaagcgacacaaacaccaagtgcttaagatgtagattcgtggggcctcacggttactattttccttagagccgtacttaccttatgagaacttgaaggatcttgaaggatccaggtggagagtggggatcagagaaaacaagactcaatattggaaagatcagaggtacctgggcatcggggatgacaatcgtggaaagtaagtctttaagataaaaggggcaaccgcaaccaagacggagcagaagatgttgatgtccaccatcccttcacccactcttatcacccagagaacgcagcagccgtagcccaccatgcggttgacggcatctatcctcgcaacatggctgcagctgtctgccgtcctggccaagaagcccaacattgtcttcgtcctgacggatgaccaggacctgcacctgcagtccatggactacgttcccctgatcaagaagcacctcactgacaagggcacttcctacaagcggcactactgcactacatcgcaatgctgcccttcaagagtcacgctatggaccggcaagctcgcccataacaccaatgttaccgacgtgctccccccctggggtaagttgatgttccttattgttgaacttgccgaggcgtcgccaccttgaccttcaagaaaaggaagctaacaagcaagtaggtggttatcctaagttcgttgaccagggtctcaatgagaactggctgcctgtgtggctacaggaggccggctacgatacctactatacgggcaagctcttcaactcccattcggtagacaactacgacaaaccattccctgctggctggaccgggtctgacttcctgctcgacccgttcacgtatgcctacatgaccccgtggtaccagcgcaaccgtgaaccccccgttgcttacgatggcatcaatacgcagacccttatctcggaaaaggcacttggcttcctcgacgacgctatttccaatccggacaagcctttcttcatcggcatcgcgcccatcgccccgcattccaacatgtacatcgatgagaacgatgtgcgccactggggtcctcccatccccctagacaagcatgcccacctctttcccgatgcccaggtcccccgtacgcccaacttcaacccagacgtcgagtcaggcggtagctgggtgcgcggcctgcgaaagcaggatgacgacgtcgtcgagtacaacgatcactactaccgcgagcgcctccgctcactgcagtcggtcgacgagctggtcgacgacgttatcaagcggctcgaggcggcaaaactgctggataatacgtatatcatttacactagtgataacggcttccacatcgggcagcaccgcatgcagcccggaaagatgtgcggctacgaggaagatatcaacgtgccgctgatcatccgcggacccggcgtccctaagggcgaggtatctaacgtcgttactgcccacgtcgatctggccccgaccattatgcagctggctggcatcccgttgcgcgacgattttgacggcgctgccatcccgctaacaaagcctgagcagaaaaaggccgtgaacaaacgccaggagcacgttacggtcgagttctggggcatggcctacatggagggtggcgtcgtgttccgcggtggtgagaccgacgtcgttcttaacaatacttacaagtcgctgcgcgtcatcgacgttaagaagaacgactacaacttctactattccatctggtgtaacaatgagcacgagctgtacgacatgaaggtgagattcagatgctaatctctccctacgccccgttcccctctttactattccttttgcccgcccctcttggacagattgctaaaatgttctccagacggacccctaccaaatgaccaaccttcttcaccccaccgccaaacctcccaagaccatcctgggccggcccttcgaggccgtggttgcgcgcctcgacgcgctgcttttcgtccttaagtcgtgcaagcagaagacctgcgttgagccctggcgcgcgctacacccagcgggcaacgtcgacaacttgaaggacgcgctcaaccagcgctttgacgacttctacatcaagcagcagaagaaggtccgctttgagcgttgcgaggccggactcatcatcgatgccgagggcccgcagtttgagacggatgggctgctttatcgggatggttcttcgtggagtgagtggacataaagatttggatcaacgagggaaggggagagtggttggataggtaattatcttgactatgctggcatctcggatctagagaaggttagtgtgatagctaggtacctaggtataatccggtgaggggatggtggacatcttcttttcccatccaccgtaattgcgatttaaaagctccaaacccactttgattgctatcaaaagctataagcgagcaatactttccggtattgctcgctccactggcatatatatggtgatggcagtggctgccatcacacgcttcagtagtatatattttggtagtgacagccacttgcgtaccaccccgctggtccgtacacttattaggtacctagtctggaccgtcaatcgagcagaaaaaaaaacctcagagctcgttgcatcaatacctaatctcctgcaacagggggaaaggaccccgctacttgcgcagctccgagtatgacctgaatgacagtcaacatcaggatgatgctgccgaatctgtgttatagtagacagtttatatcagcaaataggctcatccgtccaaagtaaggcaagagcacatttacaagaaggtccaatactgcaccgtgtccctccgatccctaaagatgacctaaaagctctatggcttagactcttccagatgggcatctagcgccagaatgcgaggccaaagggatttgaactctgtttggtcccattccagctgccactctgtggcgtgccctccctctagcaatgtctccagccggggatcgtactgtccagcgcggttagtccggttttgtcgtctcttcagagcttcgagggtggttttgcgtaatcgataggagctgcagtctagaaactaacacaagtatcgaagaccacaagcccatcgtccgatggtgcagtggagataggaggctttggccgggttgaagagcacggcatacgaggcttcgatttcgtcgacgagttcggctgggatgatgcccgtgttgatcagagcgtttctgttgccgccttggagggcataaggtaaggcgaagagttcgagagtgtgtcgttcccctgcgtggcgggtgaggaggaggtggcgggagatgttgtttgtctaggtgaatttgactccgccgagggtggagagcttgacagcgttgaggcgtttgggggtgattgagagggactcatttatgccgaagtaggtgtgcaaatgaagggaggtttcgggtcgaggtgtggtgtcggctaatgagaggctgctgttggagagggtgacttcatggggatttggcaagaggccgcttttggctacgtggtcgggaagatggttggaaagagcagtgtcttcattgtagggcgtcaacttctgtcgaacatagtaggcttttataatgcaacgcttatcgtcgtgtgccggagtggtgtatggctgcatcagcaaccagactccaaggatgatgaggacgatctccttcaccgcggtagctctgggtggcgagtttggtaaagtatcgtcgaagtaatagtgtctaggcaccgcgatcaagctattgatatattcctggactggtgggaacggcgcgttaccgaaagctgtgactacttcgatgcagaagcgaatataatcatctcttccacggcgacctggccacgaagcctcgatataatccagatacggagcacaggttgtgctggcggtattttggcaccctagtacgttcaacatgctggttcgcagagctgagtttggacagttcatcgttacttcgtcaatgactgagactgtttcgaatttactattatttgatgtcaagatgtaaataagaggagactgctacttacagctgatatttgagaagatacctaggtagttaggtatccggcggcgaggtattgccgttaagtactgctataagaaaagatggtaggccttagaaaatatcgcaatctctctacctaattttaccctcctcaggtgtgccaacaccgccttcggcgctaaatgggacacacacacacgcacgccaacacaacgagttcttgctgcgctacagagctgagatcctttagccgctttaactacttttaggcagctatcaaattttagcacatccgacaaatcccttatctaatatccttagtctgacacctcaacttagatacctatgcaaaagggaaagtcataatactgattctatgagaaatatttgcgcgcttgaaatatttgtgtcattgtaccatatatccggcgacttccttactacctgcccggtgcactctcttcgctgccttcatcacgatggaagcctttttgttggcagcaggcgtcgtggcagcagcaggcatcctctttcggcggagagaaaatgcggaagatgaccgttcccaagtcacacacacacacacacaagtcacacacacacacacacacaagtcacacatacacacacatacgactttgaatccccaggcccatcggagaacacaccctcgcgttcgaagaagatacccttgccttggggcatccttatccgcgtcgttagaggagagaaattttacttgcagactgtttacaatgaggacggagagaccactcgcgacaggggatttttggtgggaactgacccagagtgcggtataaattatcactcctattctttccgctcaattcaagtactgaaatgccaaccttatgatctacagacattgttatagaaggagagtacgcctctcctagataccttatgatttatcggcttcgatcttatagcgggtggagcgaaaagactaaagctgtccttctggacttgtctactaatggcacctctctgaacgggcgtctggttgaatcatatgcccaaaatttcctctaagatagagatagaatctcagtcgctactggcttcgacctcgtctttcggaaagtgggccgctactttcatcccgctatcgatgcccctcatttcgctttcaatgcccctcatccctctttccgtgagaaatattcactggaaaagcttctacaccatggccccgcgggagtaaatacctatgtgtgtcgagaacgtcatagcggtcgactattcgcggcaaagattgtgcgtcccaccagggctcacgactgtgtgcgtgatgagattttaatgggtatttattaccccagcatcgtcgaaatgatggagatattttaagaaggctcttcttctatgacctatatcttggagctggcaccagaaggcgagctcttaaacctaataaaacgcaaaaaactctccaagtaagagtcgcgttatgtgtttcaataactagttgatactcttcattatcttgtaagtataattatggggtgccttttcttttttcgtttaggagggaagcttacaacggccccaccttagcaccaacgaaatattgtttatcgtgatattaagcctgaaagtatcctggttgtcaacaacaacctgtaagttaaactcggaggatttggcctggccacgcatttaccacgtcaccgatatctgacagatagtggcggaacacctggctattatacttcgccggaaatcttggagggtagataatatggaaagggcgtcgatatttggtcgctgggggtggtcttgtatatgtgcctctacggcttccgaccctttgattatgatgatgatcctttaagtctcacggttcgatactgctggaaccgaaaggttctataaagtccattcaatcccgcctgtaagttacggcccttttcttttggccgctctctgttttaagctcggcactcacagtcttagtggatctggtcaaatccatgttggaagtcatacccatggaccggttctcgatcgagcaatgcttgtcacatccatagcttaccaacttaagccgggcatcaccaccgctgagtcggccgcaaactcctactatatctggtgtccaaagctcactatagcgcgaccataataaagaccagaaagcgaaagactaggctggagatataattaaaagcaccaccggaggcaccgaaaacctggcagctttcgagtgggcactagataataggagcccttcccttgaccgatggggtatgagtccttcccctggccgacggcgtataagtccttcccctgaccgacgacgccctaaagttagaggaaaaagtccgacctcagacgcctataaaggtgacatgaaaaggaaggaggatgcaatagtggagactctggctcaaatggttgaacacctcagcctacagctgccggtggcgctaagcgaagatttcgagctgcatggttgggatcctggagaccggtgctggacgtgtacgccgccggagactgttggcggtaaaccggcacaaatactacttacggtggatgaactccccgttgttattccagtgcgattttattatctacttttacccttgaagtcacaacctccggatccgcaccctaagctcatctcgccgatcaagccgctgtctaacgacactatcgacgagattctgagtatgttcgaagatgctatcggcttttatctcctcattaaccatcagttgtaagtgattatgtcggatgaatttgattacgaagaagagctacataagtatcctgctgactttggtggacttaaggtcagtttcatccgagagtctctctacccgactgccgatagagcaaggccaggaggctcttcaataaccataacaaactacggataccaggacatactaactagcctgcttgccaataacggaactgagagcttctggttcagaggttttttttgggagtatattacaagcttctgcttttgatagtaattcgagagaccgaattcgaggacgtatcggagtggttgtgactccgcggtcaaatatacggagaaagtacataaccgtattaacacattcgctcgctatggcggcggccacctctagaaccggtacaaggggacctgattggacatctgacatccatattacttcggtaaagatcggaagcagggtaagaagattatttgctcgataccctgtcatagaacctgactcaccatgagatatttagctcggacaggtggccaaggtttttgacccttctcctcgagagccctttacccagggcttttcccatgatgttagcttagttgacatcacaagttgggggaaatcatttcggtctcgttcgctatcggaatcgttgtcgttctagtggctttcacagcatgagtggacagacatcaagtacaattcgagcaagcttgctctcttggacgataacttgatagaggatgacgccagaagcattggggtcattgatagtcggtgccaggtacgtcttattactatatctcgaatcttcatggttacctacgtgcctgacaaatatcacccagatggtcggccaaggtatcttccgcgtataccaacagggcaggcccagaaggtccttcagatcactactatccagggcgcctgtagactccagagatgacccagcctcctggacaagccttgttgcaaggtcaatcctctaccgggtacgccagcccagtaatttcaaggaacttggtcaaagtggcaccccagtttgcgtggtagaaaacctgcccaacaatgctgggaagatagcaaaggtggcagggttttcatcctttgttcagatgtcctctgatagtcagagattcgacttagaaggcgagaggctctacaagaggttggaggagggaagggtggcattctacggggctttccaggttccgccggagttgcgggatggatatcagattgtatagagtgactaggcgtttggttatatacgagcactgagtggattgctgcagaaagccttttaaattctcttgctaatacatgcgttgtcaatactaccgacctaaggtaggtaaggtagatacctacccacgcttatcttctagaaaaatgcttttcagtcactgtctccagtcaagtcgatcaactccacaatctttctcttccctcccgctaccgggacagcaacccgccgcacagtcagtggccgacggacagctgcgcttggagggggaactcggactgcattgttctactgtctctctcgcttgtccacatgcgcactgaactgacgggactaccccgattcggtacatccagcggctttaaagatcggagtggtaaatgtccagacatgcgaagagctatgcttcatgattattctgcctgagagcctgaaaatacgagctcgatgtaccgaagtacctataatttttaccgcccgtttattttcgatttttattttctgtcggcgcttatatgttcatgttcattgaaagactgaggggtgtgaatgtagaagataaggagagaaatattcctcagtttttggcagtatgtcttccgaaatcagcgttggatttccctggaaatgacagtctagatgtacaccagataaagctagacaagtatccaagacaaaatcctgcctcttcaccttgacctgatcccctactaaaacatatgcacccccacagcggaatgatacattcccggcaacaaccccttgttgtcactcacattctccacagccgtccttaggattgccggtgttctcttcaacaccgccgtgctcaattttcgctcaagcctctctgccctccacaaccaaaacttctcttgcgccaaaaacaccgtgaactctcccagctccctggcggcctccttgctctgttccttgaactttctccatgacgaaccaccttcctcgtccttttcatcagcatcgaagagagttgattcctcatcttcagactcgctgtctttgtcgacgacagtcccttcttcgtcgtcgtcgtccatactgtgtccctctggcataaccccagcagctacgtcggcgagagtcttcttcgcctgcttgagcttggcctctccatgttttgcgttctcccggctcttaagatagcgctcaagaaggtggcacatcttgctcttcttgcgctccatgtagacttgccacgctttcactaaaccgggctctggcgtagaattggtaaaatcaatctcaccggtggggatgcggtgtccatagaatttgccgcgagcggagcccagctcgagatggcaaagaaaccacttggcacccggcactcctgagaagcgagcgagcaccctgacatatttgttagcttttctcgtgttggccccttgtagggtgacttaccattctcctgccaccaactccagttgcggctcctgaatgaactcgatcattctactgaccaaccgttcctcgtccgtttccttgtcaatatcaaccaaactgtcgcccttcttttcctcttgtcccctttccaacgtctccccgccatttgcggggctgattggagatgccaccacctcagctcctatttgagccgacctcttctccgccttgctcttgtgttgctccttcaacacccgactttcaatcccctccaccgcattcagctcctgctccaacagcctcttctcacacgagaagctcgaaatcactctggcaaatccggtactgatcgagcaccaacccgaaatcctgtccttcggtgtcacagccttggcaatccgggctcgcagccgatcgcaatccatgaaggtgacaatgactcgttgaatatcgaatagactttctattccggagttgttgacgatgatggggttcgggcaaatcgtgctactctcgtcaaagtcgaaaccgaagccgaggcgagtcttgacatcggccttcttcgagtgctgatccagctcggcaaggactgacttgtggtcaacatcgagaatggtcttcggcaattcctttggttgaagatttctttcttgtatgtcttccaccgacgcagagagatactcgaggtgccccttgacctcagagtcatagggcacccactctggccttgacgggccatctgacaagacattctcgtttgtgagggcctgaagtgttggtggtaccggtggaggggcttcaacaattggcgatggggcagactcagcagccaggtccggtgtcgctctgccgataccaaaagaagaagacttcttcgtgaacgaagagagcctggaggctttcttgggcgactccacaactggctcctccttctttgaacctcctatgccgatcttgaatcccgatatcgacagcgacggactcgggagcgacagagatgggctcggcagcgacattgttgggctaggaagagatgaaaatgagaagcctttggtgagccctcctgttagccctgtgcccctgcgctcaaggacggtaccatcaccgccactggccggggcttctccaggtaccgctctcttctcagcaaccttcttcacgcaatgcttgagaatataagccacgacctttccaacgctgatgaaacgctccttcagctggtgaaagtcggacccccgcaccacgccaataactccaacaatccagtcaaacggaatgtccttttgatccttgtctttgactgcatcaatagctcgtcgcagcacggagatggtttcgccataagtcttcatgatctcgtccatcttgccctgagtaacctgagagagctggaggttgtaatgtttgccatggtccttttggttgccataagcttgttgtgaagatgggtataaagaacgaccgcggacgggactccccgcggccattccagtccagttgaaaactgagacatcattgtgggtgatgataacctgatccagcagccgtgccagtgccgtggcatagccttctgcaggaaaggtaggaaaccgcacgcccaggacgcccatcagagcataagcgcggtcaatggcgactgttgcccttcgacatccagaggcctcgagtacgttttctgcagaaaagccacaccgcttcttcccgtcctgccagtcgcccagcttctccactttgctgaacttggccacgtatttcctgtcgtccaggacgagctgtagggtctcgtcaaccaaacatcgaagcacgaagttgatggcgttaagagcgtcttcttctccaatctccacctttttcttcagcacatgatgcgtaagacgggcgagaaggatagtttttggatcatcctcgccgccctcgacgaggtccacggctgcgttgtataccacatgcgccagctgtgaagtggctgtctccatcgccagatctcctggaaattggacgcccaggttgtgaagcagcattatcaggagatgcgccctctcgatctgagcagtctctatctttgccttgctcatcacgtcaccagcaccccccgtttcccggttcggcggacttgtgtgctctttctcggtccactcatgaatgtacttcatctcatcaggaacgtagccggccagcaggtctcgaagaacttcagcggttagagtgccgtcgccaaaggcgaagaagttctgtttgtctcgttgcgtgtatagagcaatgaaaggaacgagatgatagagataaccgaggctctcaactgggcggctgatagtggcccagtccgcattcacgtagaaggtggtcttgctcatgacgagctcttggagagtccatgctctggttgaccattctggtttccaatccacaatgtgttcgaatccttgaactgtgctcctttcccggaggggcagatccttaagatacggctctggctgttcaccatgctccttctggaactcacgccagtcctgtgcagcatcggtgcctgaagcatcccactcgtcatcctctagcactttgttatccagctggacaagagtaaattcggcatctgcgtaccaatcgcccatgagagaaagcgactgcgacagctcgccaaaatccatcttgttgatgcaacaggtgtcgttccacaagtagcacttctcgcgtcgccgaaagagctttgtcttgaagatttcgcctgccttcttgacactccggtcaatcttgatggcggatttccacttctccaaaagcggtacaatctcgtcaacagcatctcggagcatgaaatggttcttgaagtagtcgatctccccaacagcggccgtgtaatgcttctcggcaatctccacctgcttctttgccttgtcgagagcttcttttttctcctgaaccacaggaggcatctgcaagcgtccaccgcccgcatcatctatggccctgcgagtgctgctgatgaggttgctgaagatcttgctctccatctcggcaaacctgagttcggcccttttcttgtgctcctcacccttagcccagttcaggtagccttcggcacttttacccttgagtcgccggtccagcagattggccagactgaacgtctctaaagtgcccgacgactgtgtggcgagatacagctccttcactgctgcctcttgcgcggagatgtcgagatggcactgctctagcaacatctgcacgtcactcctctgagatgcggttcccattgcttgtagcccggccttagcacgctccaggtactttccacgcgcccgtgtaatgtcgccgagcgagacttctgctcccttccaccgatgggagagcatgcagtactggcctcgctccccaattgctggacgatggaccagattgccggtttcaaggtcaaacatgcggtcaggtgtttgaaccgaaggggggtccgaggtggtcagtatttccacgtcttgaagcccagagaatgggtgacctttttcttcaacaaaggtaggcctgaagccgccgttgggtccgaaccacacattcatgatggctctaagcttctcgtgactggcgcccagctccttgaaaattctctggaggtcctccggcgtgaagtcggttgctttgaccgcatccagcatcgcccccctgatgacatccaaggcggcggaggtggttgtcgatgccatttttgacgggttggattcgtttccagcgacgatgaagcgtgtagaacggtgggttcagggcaacgtgtatattccaagcttgtcacagcaatgacaaaattgcctgctctcgtggtcgtggagcaacttcaacgccttaactcaggccacaaataaagaagaagcccataatccccataaatttgtcgggcatcatctgtcccacatcgggccgacttgcactaaagaaagagaggggtatcttagctggagggcagttgcaaaggcgtcctgagaggtgctcctgcctcagttatgattggggtgccaaggcagccgtgcagcaaatacacgatgagcttctcccagttccttagcatttctcagcgctttctgcggggtttgggcacctatctctaatgcagttttgacgatcattctagtctggttggtgctccgtcgttttcagctcagtccggacagccacatttgtcatatcttcttcatatcgggcaccttgggacgggcggcttgttgcccaaagggtgttcccaagccaatgatagattccattcagtctctccaatgtgaggggttgttctgagggcctgggacagatttattggaacagatgccctgaagccagccgctgttggagcaacacggccaacgcccgtcttccaaaatggcctcttaccaccgtgtcctggaggtcttcggtcgctcaatcgatcagaagtccctcgaatgcgattagtaaggtctctccatgtcttccacacacttactaaccaagagcatagcgacattcacccttgggacatcctcatcaatagcgaacgatggtcaggaaaggtccggctgataggtttcgtggactcgttcttcctgatctgttactcgggcgtgtcccgcttcgagcatggtctattgatctacagtcagctccaacaacaccccatgtatgtgacaggatacttacctggccagaggatgacgagattatacgaaacacgttgaagtccgccaatgtcatcgcagagagtcttgatcttgaggtgctgaatcccaagcgagtcaaggagaacaatggtcggtcattatcgcccatccttaccatcaatacttctcatgactaatcttgttgagcctcagaggaaccgacgtacttcaaattcgtcagtgagaagggcggcctcgactacaacatcacgaccctcgggcatcccgttggtcttacgacccaataccccgcgtcttcgctcaagaagtatgacatcaagctgagaaaggggagagatatagtcatgcggagtaagagcccaggcgtcattgttgccacaagctaactcgttccgagaacgcatccgtcgtggcgtcactcaacacaactttttcggcctcctgcacgattccgtccggctcggtgttgtcacgcaagctgagttgatcggaactattattggcaaaactatcggtgggtcgacgtttgaggatgtcgctgggaagtacctcgatgctctttcgggggccaaggggtcgagaaacttggccctgtctggagagaggacatagcatactggcttcacctcaactacctgtcgggatcccaaacccaccagcggcgtaagttcccaacccatcaatttagctaccagtcccccgaaaatacctttcctgtcagtgacctcccattgcctatcctgtctgcgaccgcagctggcaacgtatcccataatcctccaaatcctcagcctttcttgacgacctcccagccataccatcgggtcatcctggccattgatgcttaagattacaatcattgttgccatcccagtggccccaaagacccgagaggcaagtctttgggcaagaagggcatatgcttcgtgcgttgaggagcgtgtttcgccccgcgcccccctccttgcgtctcccttccttgcgcacccggttcgtttcccgctccatagctatcatatctttgacttccagcaccatgttgcctgccaggtgccgctgctgttccattggatgacctgctcgtagcaccagggctactcggcgctgatattaatctgccgccatcctcttccagggaatggctgagaggatctggatatgaccaattggcgctggtggtagatggggcggcggggtgggtagttgttgggtgacacccatattgtgggccaacttggggctctggtttcatttgtttcgaggatccatgttgtgcgccagttgctttcttcgttgacggtttgttcgatgtgatagacgaactcggcgcccgggctttgtttccattccaggttttggcgagtaggctgagtcgacagaatgtttctctggagacttcctacctggctgactggttgccatgcagggctgtcactttcgtttgtttctagggtgatattagaggtatgcaaagagctgcttttagagaatgaagacttgccagattgacttagggagttgtcgggagtgagagtcttcattgtgaacggtgggggaggagggtggaatggagatcaagaatgatacctagatgcggactggttctgttggtgatagcggggagcaagactgagaggggagagggctttcagcacctggtgtatgtgatctctttatacacgttccccaggtgacagagtttcccagtgcgaagattcagtttgagacttggtccagtaggtccacttcctgcaagtcacgcacgcagtagggctcgcaatcagcaacctgggaacggatgtttatgagttgtcgtcacggcgagcctcgcgccacagaaagctcagaaaaagcttacaagctgccgctggcctatgctgtccagaacagagagtggtaagtactcttggccgcattccatcctcgtgacacacattcgcccaaatcgtagtcctcaccgcaagacacattgttgtgaggttggcaagttgggtattgctataggccgatggcctgggtagtttgaaggtttgatggacagggcaatacgaagagtctagggatgtggctgtcccggaggcctttccagaggccggttgtccgtaaaggtttccctttccacgtgtatttatgggagtccgctcccacccaacggacttgttttcattttctctctaacagtcgattcaatcctttattacagcttgaattcccacataggaccgagcccatatcaggtatgacgcattgacgttgatatcggtaacaacgcgaatgcgagtggcattcaatcatgggtgggagagagagcaagtaatgcggttaacgccatgttgtaggacacttacaaatgccaaccggaattgtctgtgatgtgaagcagtatggctatgatcaccatcatcccctcatacacatataaatcccgtgcgaaggtcctaaacctcacccaacccgcagcagcccaaagccaagcctctcaaccgcagcaagctttccccctttgattggccaagtccaccaatgtgggtccaattaaagcactccctgcatcgttggtgtgggtggtttttggtgtggtgacactcacacctcactggtccatcgtccatatcccacgctcacagcgtctcgcttgcgttgtaggtaggtagtaaactcactcaatctcacaaatccaacctcaccgtttgtttctccctttttcatccgatccgccatacccgcccacaatccactctagctacctcctccacgtcagcaacaccccctgcgtaccagcattagacacaaaatgatgccatcaccgccagaaacggaacaagaatgcgactcaaaagacccggtggatatcttgtccgacagggacctggcacgatacatcgccaaagcccgccaacatcgcgagtcggacacgatagagaataacacactgcttctcacttcccgatacatcaccaagttctacaccacgctatcacacgcgaaagatgtcgaagtagcgatactacaagcccacgcgctgggcatccgagtcccagagttgaagcgcgtcatcaaagcaaaggatggcacctatgagtgcataatgacacggatacaaggcgtgacattagaaagttgctggccggacttatccctcttcaccaccatccgactagccgtccaactgcgaacaatagtccaaagaatgagaaggatgacccgaccaacggctggctcgttggggacagggatatgcaggagtttctggctggaggagttttacggcgtgccatcgcatgcctctgccgcggtggtgggacaaatcgtcaatttctggtgcgggtttcagagttatggccgggagaggagaaaaacactggctgagcacagagagagttgtgagatggtggagcaggacgcgagagggcaggagttggtgtttacacaccacgacctcgccccgaggaatatcatcgtcgagtcggggacgtcaaaactgtggctggtagactgggacgaaagcggcttttacccccgatactttgaatacgccggcatgagaaacctcgagtacccgccagaatggggctggtacggcgagtggaggtggaaaatattctgctggatcgtcgccgggttttgttcctacgacaaacaagccgagatgttgagggatatcagacaaaaggccgggaggttcccaggagggaggaggttcaacatcaaagctggggtgacgccttcggagaggccagtggatgattgatgagtggtaccaaaaatgggcgttgttgatgatgaattgaataaaacgcagatgtcgtgtacgcatgctcgaaaatcagtcataaactaaatgaatgacaaatgaaactcctgagctccaaaaccatgcaacccttcgtctgcaacaaagctcttctccaataaagtctgctccaactccgctggttatgcaaaaaaaaaaaaaaagcaatgccctctctgaatgctctctttctgtctcctctctcattcatcctcataaatctccacatcatgtgccggtgaccacccgttcggctcctcgcttcccaaaaacatcacctctggccccatcttgggcggaacaatcttggacgtgaccttgttgttgatgccgcaaatacccatgcttcttgtgtcccatcggaagggagccgatgccccctcgcggctccagtcaacatcgctagagaagaagttgggtttctccgaaggtaaacctcgctcgagcatctcggatttgcacggctgcgtgacggtggtgggctcggcggtaccgcgagcgttagggtctccccagggccggcaaagcgcgtagagaagtgagacggatagcttggccaggtcagggtcggcgtccttggggatgcggagcagatactcccacttttccgacggggcgctggggtgttcagaggtattgctggacacctccggctccggggtggctgcagggtcttccacaaggtcgggtggcggaggaacccagtcctcaatccgttgtctgtcagatcggcatgtttcaccgaattccaggagcttttcgtaaatactggacaatctgataaggaagcgcagggcgacgggatcaatggttccgcagtagcgaaggacatcgaggcagcctcgggccctgttcatgtcctcagtccacgataactcgggatgcttatgaagcatcttctgggcggccgagtgcaggataacgacacatgatgtgtgggtttggaagctgtggggacaggtggtcagcatgatgacaagcaggaaaataattgtcgaccagctaatgacttacatgaccagccagcagcgcttgaaaatgcctctatcagcgtagaggagcccaaggatccgagcggagtccctgcctgcctccacacccaatttgaccagcttgataacagtggaattattggtgtctaggagactctcgtcccctgccttgatagaccgaatcgtctgggcagctagcctgcgatagaccagtatgaaagcaccaaggtagagtagatgaatatggtaaatggaccaacgggcatgcggtgagatgttgaagttgcctaggtttgtcagttgcatatcggatgggagctttccgtgccagtcctcaagctgcttgatgataccatccataccgccggtggtgatgtctttgtaagccagacgattcttcaagattcctgccttgagtaaggatatcttggtcatttcggtttgaatccctgaggcttgtcagtaaagcggcaggatcatggtcgtgggaagcatagatgacctactctccccaagttcctttgtgtaaatgtcgacttcgttctctgcaagctgttttttacatcagcatggcgaattcggcaaataggggaccggggccatggtcttactggcaccactttctcaaaagccgagtcatcagcgccggagatgtagccaagggtagaggcaagccagctgttgaagaacatcaaagtcctccaagtttttctgaactcaacccattcctgctcggtcaactggtcggcgttgcagactccagcagtgtcgctttgtcggtggcacatggtaagtcctgtctcgatgtatgccagagcaacagtccccttgttgttgatattgtacatggcaagcaaggtgcagactttgatggccagcaagggcccaaactcgaggacatccgtgtacaacaggcgagcagcagaatagagaagttcatctgtccctttttcgaactcattggggttgtattggacaccgatggctgcgacgatggcgaggcagccaatagagacccgttcgtcaagcttggggcggttgtccaaaccgaacactgccctatgatgctgattgacctgttcgactgtgaagacatgaaacagtttgccgctcgagctgtagaagctctggacaccagcccacattgtttttgcactggggagggcagcgagatacaagttcaccgggtcgtgtagccttgctgacacggataaagccaccaacgtcgagggggaagatgtcggcgcccatgaatccacggaacctgtccgagagccggcaatggaagtgacggggccggacagcctgctgttgctggagccagagccagattccgtcacgcttggagcgacggctgccggagggctttgagattcgccgccgctatcggtaccgccgaggacgacggcgggatcatctccggtacggatgcgctgtagcagctcttcggcctcctcgctggacttgtactgcagcgctctcatcagtttctcaagcgcttcgaggcgcgcttgcttagccgcctgaagggactggccctcctctccctcgtagccgcaaggtttgtccttggaagcgcatcctccgcatctcggacgcgcgccatcacactggagccggcagaagaagcaaaggtcagatcactgctgtttaagtacccggtgataacggaggttgcttactctagctttgaaacgccgacacgtgtggcaggcctgggtgacggccttgaggcgtttcgtctgccggcggctccccccgctgaagatcgacgacggccctgaacgtgggccggagaaaactccgtccctctctcgtttgacagaagcgggctggatgggttggtaggtcgttggtggcggggccatctccggagagcggctgtttggatcactgaccaaagtccgtcggatcgcgcgttttgtgcttgggagtggggctgtctagggcacgtcgctaggcagcttatgtctagagcggtggactccgcggacatcaacggggtttaggggtttagagattcttggaacttgtcggtatggagtaaaacaaaaggcaacagtcgatgcggtttttgtcagacggagaaacctaccatggtagatctcctgagggaagacacacaccgcgagctacgaccacgcaggattaaaacgcggggaaacctggccgggaaacgagaattgtatggagaagacatccgcccccctcccaagactttttgcaacaaaaataattgcaaatttgatggccgcccactcgcccacacacaccttcgacgcctcctattgcttgaacatgcagccagcgtcatcttcaaccccgccgggattgattagggcttccggctgaccagtggcagggcagaggggctcgacgcaccgtcgacgggttcgaaggtggcgtccccttcgtgcagcagcgacatgggctcggaaggcggctggcgtgggccggaaaagcaattcgtgcgtgtctaagtgtcaggccgggccgtggtattgggcaggtgttggcgaccttcaggctcgacttttgactgccttcttctccacttctgggcgagacatttcgccaggtcacacctgatggccgcctttgctagcggtgtgcagtgaccctccttccattttgcaccacatacaggaaggcacacaatgccaatgtccgcatcatagacaagccgccaccgcgctgtgtatttcgctatatctaatcatgaaaactccctaagcatcattccctgaaaccatgaatgaagctaatagcaatatcctccccgatcatccccccagccctatgctcaaacaatctgcaggccagcctccttcattcagataacactaatgcaagactgagtattggtgaaaaaagggcgaacctgaccttgtagaggagtgctaaaaatgaggaaacaatggttgatcgggttcgttttagactggagtgatatgtccaactatgaccgccataagatggtggacatcttctaatcgttccaatccgctgacaaagtctccttccaagcagcatcggcgaaaaatgcataaaaaccaaagtacgtgctagctatactagctgttgcaccactgtaaacgctgatgagatgagcagcacggaatctggttttcgaaaggagtaggcgttacagtggagagctcgcacgggaacagccgtggtggtgtcggaatagaactatatagattgcatcaagatgttagagaatgtttctatagcgaaagcgtactttgcttaccacaatgagtggtccgaacaccacgctggaagaacttgctcatcattgcggctgggattgttgaagatgggaagaggagtttataaacgaccgactcagtcggttgtaactactggaatggcggaaagtgaacttgtgataagaagcgaattggcgaaaagtgacttgtgttgataacttgaaccgttgatgggttactgttgttggtcaaggagaagaaaagttgaagctgagaagaagctgagtccagattttaaggatggccccgaccaagactgagcaaagtatggtgtgtgtggacgtgcgcctgaagggaaaagctgaaatctcattggtctcgtttcataaagttaaaagtcacttctatcagaggcgaaccccaaccctcgtgctgtaatctgcatctgccctcttgttgccctccgtcatcatgtgctcacggaagaaatatggctaatttcattgggagcttcacggtgagcacttcggtggcgatgtgggttatagaaagaaatatgccgaggactgcgaagtgaataacatcaatcctgcaccatgaaaccattgtccagaagaccttgtatgttgaggccttctacttcgtatgcgagtattcaagctcgaaacctgtctcctcaaacccgtttcacgagacactcgtccaaaatgaccactaagccacaacccctggcccccccccctgaaaatcacaccgtagagcttctccgccggcacctcacacccgtcccacccatctcacaatcctcttcaaccctcaccgacttcttcgccccctttgcccacaacgacaccaaaataatcctaatcggcgactccacccacggcacctcggaattctaccaagcccgcgccgaactcacaaagtactttatccaacactacggcttcaacattgtcgccgtagaagccgactggcccgacgccgaagccatcgacaaacatgtccgccctcgctccccatccgctccctccctcacccaagacagcgagaagccctttcagcgctttcccacttggatgtggcggaatgtcgagtttcagaactttaccaaatggttgaaggagtggaatgaagggaaggacagcaagactgaggcagtggggttttacgggttggatttgtattcactgggcaagtcgatgcaagctgtggtagattaccttgacaaaattgatcccgagatggcaaaggtggcacgaaaaaggtacgagagaatgatgatgtgggcggaggagccgcacgagtatgggctggaggcgcttgcggctgggtttaagggatgtgagaaggatgtgatgcagattttgaatagcttgctgaggaagagggttgagtacgagagcatgatttgggatggggaggagtttcattctggggagcagaatgcgaggttggtcaaaggtatgaggaacgtcaagacgactgtcacgctgaagctaaccggagtattagatgcggaacaatattacaaagcgatgttctacggccgcgacgagtcatggaatctgagagataaacacatgtttgaaaccttgaaccgaatcatcaagcaccgatcgaggagcacgccgtccaaggccattgtctgggcgcataacagccacattggcgatgcgcgtgccaccagtatgggctggtcgaacgatgaactcaatatcgggcaactctgcaaagaggcctacggagatcaggcccttaccataggttgtttgaccaacaccggaacagtcgctgctgctcgcaagtgggatggagatatgcaagtcatgaaggtacgacctggtctgccaaacagctacgaacagttaatgcacgccacagctgtcaagaactttgttctggacctgcgagttggtcattgcaacgaggagctgataaaggcgctcatggaaaaacggttggagaggtttgttggagtcatttacgctcctggcaccgagaggcagtcgcattactcccatgctgttttgcctgaacagttggatggttttatctggttcgatgagaccaagcatgtcggggcactcgaggtgcaccagccccatacgacagtcgaatttgatgagacctggccattcggtttgtaagtttggatgacaaagaatgcatgggcaaactggcgttttggcgtgggctgcacggcaggaggcgtacgtcatctgattgtcagtgcacgagcttgtcctcaacacgatgtcattatgagttagcactcatgtacacatataaaattgcaagaggagggatttgacgcagaccttctgccaacagtctcgagtcccaacacaccacaaacaccaatattatgactgaccctgggaaccgtgagcgcggccttcgggctgctatcagcaatccccgtgtgtcggagagggccaaacaacgggaccgagagatcttggaacaggaattcggtgaatcgttcgaaacagatccaacttccgcaacaacaagtggcaaaaagaaggcctcttccgaggaatcaattccggacacatcatcgagaacatttcgagcatcccaaacatacggcagcaggaaaacacgaagttcgtccagcggtgatcttgaaaccagcgctccttcggccagcatgtcatcgacggttgatgacagtagcatcgacggcaaggacaggggtaacgtgtaagtcccatcgttctgcttgatgcacgctggccactgatatcacgaagtgttcggggcctcaaagcggcacttacaaatcctcatgtctcggaaaaggccaaagatcgggatcgcaagaagttgcaggaactaggggagtcagtagagtgacagccgccaactttgtgtgatcataaatgccttatgctgtgttgggtgcatggctgtcacatcgggtaacgagatacgcggcccctggagttgaacagattggtaccagaatggaaataacgcgcggccaacagggggaaggtaatggtcagccacactagatagggcaaaaaaaacctgtaatcgctcggttccgacggcgagtgatcgcatcgatgaatggttcgatgtggttgtgttgtgccccacttttaacgtcaatcctccagaaggcttggagaaacggtgggggagggaagctagatcgaccgccatgatttcatccaagccttcgccgttccactgtgcatctttaaaagaacacgaatgtccataatccacaggtatggtgtttgagaaggacagacgccttaccacaactcaggtacccgaaactcgtccataattcttgacgttcgacgataaacacaggctcaaaatgcaccacgtcgacatgttgcaccactggacgactccagagaaacatgcacctgcaccatcgcaaccggcggcggcgccacaatcgagaggccctcctcctggtgcaactacaagttcctcaacttcaaatagccccctcggcgccagcaatcccagctcgaatccaccacaaccactatcaccgccaggtagactcgcaagacagatttcacgcagcaacaacaatacgccgagaccttcgacaagatggcatcttctgaacctgcctcccaggagccagtcggttccgagaccgttgagcagcccgaatatgccgccgtctccgatgttaagtccgacgtgaaggaagaggaagataagactgcgagtgagggggagacgaagctgggtgaggtatgttggtttttttgttttctcgatgtgatgatagtgtgtgtgctaacgttgggacagaccgcagaaggagaggaacaggagggtgaatctgctgtgacagagggggagacacagcaggaggaggaggttgaggagcggaagccgaaaaatagattttggtgatagatgcgttgtgaattgaatttttgttttgcagccatgcacgcttctccctggaacacaacgagtgccatcggaagccggagtgaaacaacggaagtaagccggaccacggcccggagcggagcggcacggcgatatccactcccggccccacatctgacgttcaaccgctcttgccttttcgggaagtggtgatgtcatgaccggggcaaactctccagcgtaattgactgtttgaacgacttgataacgtcacgatgataatgcgtttttggtggaggtggtgcctgaaggagatatatgggacttccttgaacggttttgggtccttgcattttcatctcatctcatctcaacttaaccatcaacaccatctgtccttattgaccctaacgacatcacacatcttacaacaccccacagcaatcacctctacgagataataacagaaaacagaaacaacgacgaacatgcaatccgtcctccaatccaccaccggcctcggcccaacccccgtccacccctccaacctggacggcaaagtcgccatcgtcactggcggcgccctcggaattggtttcgaagtctcccgcgccctcgccaacgccggctgcagagtgattatggtcaaccgcaaagaagagcaaggcgacgacgccatctccaccatcaagtcggagtcgccgaatgcgcaagtcgagtggaagggctgcgacctcggctcgctcaaggaagtcagagaggtcttctccgaccttcgaaactcgctcaatcggttggattacttggttttgtcggcggggatcaacactaatcagtatgggcttgatgccgatgggattgacaggcactttggggtgaactttctggggcacttttacgcggtgaatcagctttggcctttgctgcgcaagacggacaaggtgcttgggggaaagccgagggtggtatttgaggcgagcgagatgcataggggggcgccgaagaatgtgcattttgccagtttggaggagatcaatgatgagaatttggggccgacggagttgtatgcgaggacgaagcttgccctgattttgtttgcaaagtatgggcttgccgggaaggtgattaaggagaatggagatgggattattgctgtttcggtgcatcctggggcggtcaatactgcgatgcagcagcagtggaaggatgcatatccggggattacgggcaagttgctgacgtgggcgatgttggcgtttgggagggatgtggagcagggttcttatagtgcgttgtgggcgttgacgagtcctaagattgaggaggagaatatgaatgggtggtactttaatgatcctgatacgccggggaaggagtcggcgcaggcttcggatgagaagttggggactgcattgttcgatttgtcggagaggattatcaaggagaaggttggagaggatgctcttgttgactggaaggagtgtgcttaagttggggtggtgtgaggggtgcaagacgcttgtatgatagacatgagatggacagagagcaatcgagcattgtcactgatcaccaaaaagggttatatgcgcctgacaaaagtccagccatccatctaactcttcttcattatcttggtgtgtctatgcacagaatcctccatccggtattactgtgcaacaggacaatcaccgtctctcactatacccatccatttccataggcgactgtggccctgccggtcgaaagctgtattgcggtggacctgggctcacgctcggtgaagggcccaagccgggcgaaaacactgacaactcggcatacccatgattggaagcgacctcagctggtttccacccagcctctgcctcttgaagaggtatgttcacaggcgtcctggtgtacagatacttgtcgcctgcggcgagagcctcttgtgagcctgtctggggcagcttttgtttttgcttcagaggccgatagaagaagtaccagatgcctacggcaattagagctaataggcctgcgagtccccctagtacgccccctactatggcgccgatagagtgaccttgtcctgaggattggctgttggggtcaggtgagtctgggttagggatgccgaaggagcctggggcgaagacttgttggagtattggagtggaccacttgacgttgcttagggatctgggtctggattagtatacgtccttgttgtcggactgaaagaggaaagctaacccattcttgtaccagtccttgatgacttgaggggactcataatcgcccgcgtcggcatcgtaattgaaccgccacgtcatgctcggcatgtcgaataccatgagaccttgcggggccggatctggctctcgccaccccggggctgtcccgcctacactgatgacttgacgttttcccgctggggtgcagtgatggtctgctcttcgctgggtgggcatgttgggggccttggtccagacgaagcctggcaggctgaggatccatgcgtcttcgtaacggaagtcgattcctggctcccttttgctttctcctccgaagagaagactacatgtaggtcgctttgtcaggaaagacctcttgtgttggtggtgtagtgtcacttacatgtcataaccaccttctttggtagcaaagcctgccaggcaaaactcccgcctgggacctgggggtgtaggacctgtggtggtctgatagtgcatctgtcttgtctctggatcgaaaatagtaatgttatcaaacaagtggctcgagaccgagctgtaatcaattgcactgtttccatctacccgcttctcgggaatgtaccctcccatgatcaagataacaccccgcttcttggtgccaaagttgaactgcgggatgtgctcggctaccgcgcccaccaatgtttcttcgtatccaagtttttcaaaagttttggtcttcatgttgaacgccagggcgcctgtggcgatttctgtcctgccccaccccacagtcaggtcggtccactcgcctgccaggccgccgaatataaaagctgtttcatccgtcgcggcagaagctgccaattctgtcaggtacaccgtccggagaaagtctgggtttgacggtgtctcgattgaccattttcctcccccggagccatctgtcacgaacttgtagagctcgggaaactttggcatgacgcggtcttttctgtaggagaccataccgccccagacataaaatgatccatcctgttggttggtccagaatgcaggccgcgatctggccggaggttttccggaaattttgttatcaatgattcttattggaacggttttggcgtcccaggacttggacatgtcgatggaaagggttgagttcatgtagtttgatcgggatccctgctggttttggtcaccgacctgctgggagacttctccgccctcaatgtagaggtagtccccgatgagtgccactgtttagcgttagcgagctcctgtatggattcgaagggcgtcgtgaaggatgaaggaacacacacctcttgcaaatcctcggcgcacaaatttgtctggtggaggtgagtcggatatttcttggccctctaccaagccgtgaagttgaaaaattccaagtccgaggagggcggctcgaactaatcctgacctgcaggagctggagatagcagtcatggtgtgaagtaatgagtagggcaaagattacgttactaggcagttttgtgtgataaagaagcttgtcagaatggtgaaaagtatcgaatgcaaaatgattcttgatccccatttacaggcacaacatgtgcttaatcgacagtttggaagtacaaacacaaaaatagttgttcatgcattctgaaggcgcagacgggggctgtgtgtgtaacattttgcttggccttgttgggttagtccgatctgaccaatggaccactacagcccatatctgccgagtctgactgaaacgtcaagaccaacaaggtcataatgtggccttcgcccagtgattcgtaaatgagcgtgtcagatggtaggagctgttatagctgttgggggccaaccctgaccacccttggcaccggacaaccgcggcagaaggacaatgtgcaacatgttggcaggttcgtacagagctttgcaagtcttcgagttattacaccacaactaaactaccaatttagcattcaatttactaggctttcttctatcgaagccacctgtaagcctaaggctggccaaagatgcaggcctatgatgcgtctctctggcaaccagagtctggttgtagctacaaaaggggttcaggggctcagcggagccttatggtgcaaaacggagtccaaaaacatacaacaccagggattccccagtggtcacccacctgagtactagtctggctgtcagctgcttgactaggggagagcggacgggatcccgtattttcagctgcatatggtcgtatgtgattgttttacttggaaacaagcaaaataacggcatcccagtaggtagctcgcgcgacatgttcaggcttttgttagtaagggtgtatgttgtcagcaagcctgtcgcaatatacttggagccgtattccagttctctcctggaatgtgaaatgtccagctccataccatcgcaaagcacctcccatcatcacgaagaacgacaagaaaagctcaggaccgtatgaggcccatttatcagctgatcacgtatcgtgacaaaagccaaataagccttgtgcccagagtaaaactatctgttacggctacagaatatgacaaactccactttaggtgggcaactcgctgccaagggaggaaaggtgggggccggcttggtatgtatcacatagtcttgcgacggcgtgcacatccgtgttatccggaaactgtcaactagaaggcttcttacctcgaagattgcgctatcgacctctgggtccacactatgaacagctaaaggcctgtactcgaggttgactggcagtgggtctaccattgtttccgaccccggtaaggaccagcagattcaagcatcaatcacagcatggcgtgacatctgaggggatgtagcagtgctagcatcattgaagttatcctttttgagatcaggttcctggccctagcagcactgcgcagtgtgccaagagatacgtagcccagcagctcgtcagattcagcttcccaagataaaaagggtttgccctcacaggcgaaacaccagcggataccgtttccaatcttctccttttaacttctccttctccaaggtaggtatttcacttcgcttgtcatctcgaactcctttggagtagcattttgtcattctttgcagtatggtcgtcaaagactccttgttcgaggtctctcttcttagcctcgtcgctaaacctcaaccggaatcctggaaatcccaatacaacctcgcttattcgacgaagaggctaataccagccatcattgcggttggtctcttcatacgagtgttcaccactcttggaaaggttatccacaagcgactgaaggcatggaggtttctggtgagaggaagggatatcatccaagatggattcaccatggtaagtgcttgtatagtcacaacaccatacccggaactctgaaaaaaagctccatgaatctaactttgcgtttttgcggtataggctaaaagcaaaggttacgaagtcttgacacccgagtcccgctacatgtctgtctcttcacctggccacattaaagaattcctggcggttccggactcggtattttctctctatgcagcatcaagacaacttctgcagcccagattcaccatgcacaacttcaactggctcgacaaggaagggactaaaggtggcaatgagggtggtggctttgtcagagctgtccgtgtctgcttgacgagcaatttacaaatatcgtgccatccatccgcaagctcgtgtgtgaggagttggatagtcttctttctctcaagaagcttgagaatggtgggtaccatgaagcactgagacatcggactatagtgccaaagtcgaccatgatgctaaccgtttgaaatccagggttccatctcgcacccatataccccctcattcttagactcaccgtgctttccaatgcagaagttatcttcggaaaggtatcaggtaccttatgcccactcttaacaagatgcaacttcacgccccatcaaatggctaatagactcccagctcgaaacgaacctttcatccaggcagccaagcaatacatcgagcggtgttccttggggccgaactcattcgtcttttgcctggatggatggctccataggtgaacaccttctatttcaagccatatagatacccgctaagctgcatggctagacttgcaagcagagcgcttcgtccttggctcaatgctcaacatgttgtctacgacatctagacacccattgcagcacagcgtctgcaggagctggccaaaaaagggatacctgtaccacaacatgttaatcgactccccaagctattcttcatatcgcaaagtctttacgttaaccatcaccataggctgattgcatgcaatggatcatggaatccctccctcaggggagagttctcactccgcagcggcttgtccacgagactatggcaatctggttcggcttcattcatgcagttgccggagtaggttctcttcctttgacctcacacgccgcagtatcttaactgatgtccatgaccaggccatcacaatcgccctccaagatctctgcctccatccggaatatctagagcctctccgccagggcattgacaaccactacctcaactttgagcacactgcccaaggactcccactgctagacagctttataaaggaatcagcccgtctgacccccactgaagcctgtatgctaccatttctcttttgttctttttgtgacaagactaactaacattacgcgccaaacagcaagcacccgccgctacgccgtcgaatctcacaccttctcagacggcacccatctcaaccgcggcgactgggcttgcacacccctgatcgctatcaacaagatcccagagtactacccaaacccagagcaattcggcggtttcagatttgctcctccagaggtgttggagtccctttcgaagatggaccaagaaggactggcaaaacaggatactccgtcgaagctggtggatacagaccacaagtggcttatgtttgggaccgggaaggaggcttggtaagaccttctcctgttgttggtggaagagaagtacatggctgatagatatgaacagcccaggaagattctatgctgccgctgctgcgaaggttatcatgtcgcagatgatcagcaagtatgacatgcgaatggtggacaagactgcaaagagatggtggagtttgaggtcgacgattgtttcgagggaggatcttatggtggcgtctacatgccgtgctaagaattagagcgtctgggcagaggtaaaggagttgtcgataggtagacaataacaaagagaaaacccctatctcgaccccctgagtgcacggtccactaatcaccatcatcaatcacaaatcacaacatcattcaaggcaaacaacctctcagaactggcagaacttggaattccctatgtacaactttcttgatcccaaatcctccgtgaccccatcatcttgttgaaagtattgatcgtcacccagttcccacccgttggactttctcgtcatcagccaccaggtatcactgccattacctaagcaacacaggcatcgcagacagcctggacggcgttgaggacagtcatggcgttgaggagaccgcagctggagatgacgcagccggcggcgttggagcggagggcgtcccactggccacacatgcaggcgtagtcggtgttgtcggggcagccgagatcagcggcggcggtgtagatgcatgggagctggaggggctgttagctatgaggtgagagaaaagggaaattggggtgagaacatacaccacaggcggggacggcgtcgacctcggggcagtcagcctggcggcggcggagggatgggctggcggtggcaacagcggcgagggcagagacgaggagtgtggagaattgcattttggcggttggttggtggtttggaagtggctgtgtggttttatttcttgagaaggtggagttggatgcttgagtggctgatgctgatgatgagagagaagtctgtccagagcaagggggagaggctgttatttatacttctctggttttcatttccatgttgcttttagactattcatcccgttttccaccctacatgtacctcatctctctctcaaagtgagctcggcggtacacggggatgactatgaggcctcgcatattctaccgatgaagcccctgcccccaatcaaggaacactagctggacatatctcaccctgttgggacgaatggcaaggaattactactgcaagccggctgtgtccgttgcattcactcagatccgcctgttagcttcgggagttgctcgatctacccccccccccccccaacacccatcaggcatggttgcatctaacggaccagtccccagatcagcgcgcttaccccggattccttcgaggtgacgatcctccccgcaaagcttccctagcgttttgcggggaaactagagcaaaccggggtcaggtctgcttccaactgtttgtaagtggtgccgcgcatgaatgtctgttgaaggggttacatccgggtcggggcagttgacgctgagcgaatcaggggcttggacagacaccgggataatacattgagaggtccatacgcgacagctcgtttgtcaaaggaagacatgtccgccgaggcatgcaacggcgaagctttcatttgatctggcgatgtcttcatgtgaatgccgagagtagtggcaaccttggtagggtgctactcatgtgtcctcactttttatgtgattgtgactcgagacactttaacacgcagaccaagcctccgggtgcttcatcagccaacctttcggccatgagagagcatcgtggcgggttaatgacagcctgctataacacatgcaatgcatgactgtagcttggcaaacgaggagagagatgacgatgtaacaacccccgcaaacaaatgcagtgcttttggtattacagaaagagctggagtctatccatctactaggcaggtttattggggggctattgtagcggctctccctctgttatgttctcatcatggacccggtcagacattgatatcttgatgacaacatcacctcgtcaaattgcaacatgacctatcctttcaactaaccaaaaagaaacatctagctttgaagacaaagcattccaaatagcaggagaattcttatgaagtaagtctcttgtttgttttgttgcggtgtacatgatctgatgtctcatcacatgctgacggtggtattcccgagggttgtttaggttccaacgataatgatgtctatttcttaacttgccgggttcagactacccttttagaccacgagagggtgtgcgatacgaccctgttccttgttttgacagatttgtgcattagacctttgcaatactggcattgaaatgcagaagcagacagcagtgttcagtcgcagatactctacaaggtgtacgatggttctccatgtaaagaatcacatcgagacctctttatagctttgaagtactatagaggtaacttgtggttgcgtatactctgggctctagggcagggagaggggaaactcatgatcccaggacagggttgtaaatggtagcgcagtgcttaaagtaggctgggctgtagagggtcatttaacgctcaagggcataacgctctaacagttgcctcctatggcgactctactatgatagttggagcagcttgggaggccaccactgttgtcctataattcagccagcggtctaggccctcttctcgttgtcgatcttcactcagatagttcagtttgtctttcacaagcaagtacctagactgtgaacctcggtcagcatctataggttctccatgtgttctgatctcatcagccttcaaaaggagggtactttactcgggcgtagcggttgctcttccaccagacacgtgccgtcattccgattggctacattggaaaaccttggaggtcatcacatatggacctgcttagataggtatctgagtatctatccaactaaggagacgattatgatttcgaaccaacttctacttgctactaactaccttgcagttaccttgctaggtggctctccgggtgacccaaacatcattgctacaacacctccccaggtaaactcgtcaaccctacatttctgtgtcagcacaatttgtcaccaaatctaagtcttggatcaggtgaaaacttacacccctcataatcctcatcaacacgcggcggcacggtacacttgaccgcctcctctggagtctgcgtctccaaaacatcacaaacatccatggtacatcgggcatccatagcacgctgtaaagcgtcatctttccatccgaacacgtagtcaccatgctgggagaaacccttttcgtctccggtggaccagacaaacggctgggatccgtcctccggccagaggtcaggatcgctgaagaggtcggtctgcaagcaacaagtcagtaactcagaaaatgccgcattccggatcgaacacataccctccacctaacctcatacataacctgaggaatcaccaccggatgtgtgtcaggacaattgccagtcggaccaacatcgtacgccccagcaccttttgcataagcaacatggctcatatgatccgggctatcgagattaacaccatcccagcatgttgggaaagtaatcaccgatcggatccctcccacacagggcttgctgggaagcttctccgtatctggcgacgcgcagttgaggtttctattgtcccccgactcgggcatacacctatggcacaccttgaccggcgccggccctgcgtctggaccctccttcttggcggcatcgcccactagcattctgaagccgggcttgaaagccttgaccgtgcccggagtggtgatggtagttgacgggatatagtagactgtaataccgccattgccacggagcccttcttcttggtgttgtggcacgcgtttgtaggtgccgtttcgggcacggaagaacagcactgcagtccagtagttggagagatcctcggtgaaggtgcagcttgtgcaggttgagttcgagaccagatcgtggttagggtgagtcatatctgggcggaaggagttgccaccaacaatttggtggagatggggggaggggacagagccggggttgacaagggggtcgattcggtcgacgacgagctgggagcaggcgaagcgcatcatgggggggatgacgataccggggggctgggcggaggcgaggtgacccgttagggtcgcgcccagggccaaagcggttgctctaagaagcatctttgtcggtgaagaagtgatgtaaacaaaaccgagtcgtgaaagagggtggaaagtctaaagttcgaaccacttcgccctctcagacgtgtcggagaatgcgggtgcatgtgggctttattgacgaggacatgttttgccccctcatgctgccaatatctttcccacatgggcaaggcctattgctgataaggcactgtaatcttgatcagcgttgttactttgtttgtagattaattgtatttaggcggcgacgtcggcagttcaattgatgaccaaatggaaaggtctatgtctgaccaacatcgggtaggaagaagacaacccacgtcgcacaagcatgcgcaacgcccggctggcctccgcgacgtcccgctgcaggaaatactttatcctgaagcgtgggttaatttgtgtattggaggtggaccacgtgtgaggggccgatgtgtcttcctgctcttgttctcgaagctcattcccggaatgaaaaaacaggcatgcagataggcatccctgggagacttttgttaggtccggaatcgatgcattgctttcccaccatactcttaaagtgcaaaatatcggtcttaatacttgcgagcaatataacagtaatctccatgacctcctttcacatacgaccatacgcagttgaaaatacgggatcccgtccgctctcccctagtcaaacaactgacggccagaccagtactcaggtgggtgaccactggggaatccctggtgttgtatgtttttaactcctgctccgctggagatccacatgctgaattgcccatggcaactgtttactttgcccctgaatcatcttggtgtggactgtgcggctaagtccttcgctccatatcctaagtagctggtggcagcagttgtcaatccttccatacctagtcaagaagataggctaaacatgtcctgtttcgcggactaacagagcatcccacatcaccaacaggccttgcgtcaggaaccaaaggcgctctttctcttttggctcaatctgggccaacaaactggcatagttcaggttcagtgaaagcttaccccgccaacaacattccaagcaattcaggttcgcagggcggaaagatatcagcgcttactcgatatatcgacggagatgctggtatattgcactcccagtatcaagattgaagttactcgatccatgatggggcagactcctcctgacactattcctctcccgatggctcagggtaactctgaagtcgacgaaaaagccctcagaggtttgttcgcaacgacaacatgctcgcagcatttgtaaatactgatctcaatgcagcacacccaattcccggtcggcccttgtggaatctcagcagttcggcaagtctctttgggggaaaacaggcaaactgactgtgaagctccctgatgcgacattggaggactactttctcaaggtaattctctgtcctgcccgtggacctttcttctgataattgaactaattgccgtgaaatctacgtttaggtgatacaaaaccttgactctatcggaaagcaaatgtgtcacggggagtttgaatccctgaaggcaatccatagcgcgtcacctgggtttgtcccaaaaccatatgcccggggaagattgcgaatgaagaagggagttactttcttcttgtggaattccgtcacatagcgcggcaggtaagtaatattgctgtattacttacaacttgatcgtggagttgatgatttcaagttgtgctaacaagcgatcctgttcaagcccgctgaaccgacaaagttggctagtcacctggctgacatgcacctgcgttgtgtctcacccactggaaaattcggctttcatattgccacctgccgcgccaaaatcattcaagtcatcgacgtgtgggatgattcatggtgtgtcgttttccgccgtcacctaggacacatcaccagcttggcatcgcccgtctttcaatggcccgagttcgacattgtttcccgtctggttctcgactaagtggttcctcgtcttctactgccacttcaatcagacggtagagtgctgaaacccagcctgattcacggggactgctgggatggtaataccgcggtggacaggaagtcgggagaggctttcatttttgatgcatgctcatttcaccgacacaatgagcacgatacgggcaactggcgagcccctcggcataatctgagtggtaaagcgcacattgagaattacgagctccactttccagtttcagagccaggtaggtgccatctaacatggtgattatcctgtgctaacttctattgtttagtcgaggattgggatgctcgaaaccaactgtattcactgccgtacaacctaggcaatgccatctatgttcctggatcaagtaggagacaagtgtgagtgtctggaactttcccgtcgtttttatgattatgttgccttgctaataatttgcagcgtctatgaggatatgagaactcactgtactctaatttgtcttgacgttttgcgtgaagagatgcaacttgggcgggatcccggggatactgaaggtggcttggtttcatctgagactaggttggcctctagcaatatgagctccgaagagatagagatagcagagaaggaccgtttagaggtggcagaaaattagtaggacaaataagcacggaaacgcacgacaaagtctttgatcgtcaacaacagataaatagttatgctcgattggaaggccgtacagagagctgtgcattatgctttctgcaaggcaagtgcatggtgctgctgttgggcccgtcctgcgggccaacacctgctggctcggtcgcttctgctgttttaaagcaatcaccaagtccttgattccaaacgctcttgctttggtgtccccagccaaagagcaggtctacctgctgaatcctcgatgtcaccatgtttgctcctttcgagtcgcactgacactttcttcgccttttgctccaacttgtccacgccatccccgatacctccgatatcctgtcgcgtctcgtcatccagtgcgcaaagcgtcgccagacttgagctcttgatcacctgcacacgcgacatgtacgtcgctgcgacagtcagaacgagaaacagggttgtcaacaccagttgcgtagtaagcatgcccatccactcccatcgaattctgacaaacgcctgaggggcgtatacactgccctggacaacgctttcaggcctggacagccgagtcgtacccgctctcacactgcgtattttgttagcgaatatcgaacatagttatgggcagataacgttactcacaggtttgtcatcgagcgcgccgcattggtcatcacagtctggatatcggcgagtcgcttttcgggaggaggtaactcggttgtcaagaagtctcccagcagagaaaaggcaaatgccttagctgaccctccaccgttcgaagcaaccacccctcgagttctatccatcagcaacgagtccagcattgtcgacgctagtaacatggacgccgttaatgaagtccaaacgtttatcgtaaagtcgacagaatcctccgcattcggtggcctttccaaggtgaattcggcccccccataagtgtcgttacactggcccgtggaatagcaaggatagaacttggggtcccatgccacattcagtgtgttgtttagttcactggtgacctgcgataaggtcgagacttctcttgtcacagactgaccctgggtgacttctgtctcatatgttttggtacaccaccagaacgccaattccaagtacttgacctttgacatcatctcagtcaatgcgtcagcgtcagaggaagtgctaaccatctcttctgtataagcaatgaaactgtcgctgacgatcaaatcagttaccgattggttgaatgccccggtgggctcgtccaacaatccaataatgacgggaaacaccttgtcgatggcggtgtaaaagttcccgtaaccagctgagcccgctgtgatgttgctggtctgaagaaggagttgaagacgcttttcagttgtctttctgagacggtcgtggagcgcagggttgttgactgttgacaggtttgccacaccaccacaaacggcaagacttccgtaggctggccagatgcagtcaccagatgagcaattagctctcagttccgtcactctctcggtggaaggggtaaagaacccctcgaagatggctcgctgctctcgcagagtgtcgtacggtgctacaaggttcaccttcgttagcccatgttcacttttagttgctacggcttgctctgaacttactaagagccaacatgtttccatcataggttgaaaacgtggtcgctctgtccacgctggcggtatcgttggcctgaagtgacagggctttccgtacatcgtacgttatggcttgctgggtaagtgtcgatgtgaagagaccgctaagcataatcaaggcaccaaatgaagcaagtatcctgcatgttctctgacatcagcatgcagtctgaacgattttcatcacggggataactcaccccttgaatccgactagcagccgcacgccgccaattccacccctcatcgcatcatcgaacacttggaaatcaagtagcggtcggtgtttagctggccgaccgacaggagacagaaaccaaatccatttcagctgtgccaaaccctccgcgatgggtaccaaaaaagccactttggctagggatgtcaagaaggctaggatggtgtttagagtgacgcccagatacatctcctcggagggtcggttgtcagcacgccacaaaagaacgaatatagctgctcgagcgtcagctgatatggaagtcttgacacagattctgagtctctttacctaccgataagacacagcattccgcccagctgggccagtatttccggtaaccatcttctcaactggatcgaagagattaccttcgtccctggctcctccccatcactggttctcgtatagcactctaacctcactctggtgctggtctcctgcttcgagaattggtgttcctgcgaaggttctgccggaaattccagccaagatgtttgtccacctgagaagacgcttgcgctcgccatttttgagcggttcacggatgacactgaattaaagaaggttcaacatcaacatccacttcgtgcaccacacataacaatatggaccgttcctaataaacgcattatcatatactaccattgaatcgaccgttgaaacattgacgaccttctccaggcataccactaggctgcagactacctatttccggaccctgttgtgctctcaaatcggtgcttcgcctcacaggcagaccttgtgtgatgtaaactcgccaatcgctaccgacccttccgacgcaccagcgactcttccacagacatacttgggctcttcctacctacttgtccactgaacgaaaatcttttcagccgtccatacctctcaatcactcaaggtcagcgaccctggacatgccgtcttggcgattgatagacctgctttggatgccttctcttcccccccgtagcaacgatcgacggcaaggcacaccagccgaatcaaggcgaggacgaatgctgattggcagagtgcccgagtttggtcctgcatggcactcactttattctggccgtcttacttgcatcttggaggtgagcatgccagacagtcactgactgtaggtggccattcttccaatcccacaccaccctcttggcatttgctaaccacatgcgcgctttgaggctttcctccactcagcttacacaatcgccaatctgacttgcaggaggttcacaaaattcccacgcggtctgagccgcttgtgtctagcttgcacatccttgctcttttgacactccttcaagcagcgaatcaacaccacgttcgctcccatctgcctttcctgggaccgccattgacgatcatccgaagtcagaccttcttcttgtgccccgcgttcccagtttcccttccccacattccccgggatcagcttccggttctggaaggttgcatcggagcgagtaccgctgctgagcccttttgcccggtagtttgactacgtgaccggagatcttgctggtgtaatggctccttggcggctattggtgtagtatggtggtggaaagaacccgctgaatctgggtttaggacggtttcgcaaacttgaagagtggtatcgccgaaacggcgtgcctggatgattgggtgaagcaatgatgcggcggcatcggggcggtttgcatggcgggttggacgacgatgtggtgccccgacaattactccgatttcttctactcagatggaagggacagggtgatgtcttgagtataaaatccctggtacggcccccttacttggtgttttattgtctcagccagtcgaggattggagtccggaagcataacagtcactctatatcaacccaccccctccgcttcagttgctcgtgtcgccgccgttgtctcttcactcttgataaatcgtcaaaatgaaggccttcaccctcctcgccctcgcggggtcagctctcgccctcccagccagcaccggcgtcctcgagcagagacagtccgcggtccaagtcaccgacgagctcatgtacggcatcagcctccccgcgttcaccgcccgccgcaacgcccgcaacccccctaccctggactggacctctgacggctgcacttcctcccctgacaacccgctcaacttccccttcgtccccgcctgccacagacacgactttggttaccacaactaccgcgctcagaaccgcttcacggagagcggcaagctcaggattgacaataacttcaagactgagtatgttgagcccttgcagactgaatttgtaggacatgttgctaatgagttcgtgtttagcttgtactaccagtgcagcactgtgtctctatctggcgtttgcaggggtcttgcggatgtgtattatgctgctgtgagggcttttggtggcggtgatgctacgccgggcaagcgggagactcatgatgagctggtgaaggagtatgaggagaagttggcgatttacaacgcgctggttgctcaggcggaggcggatgggttgattcctgctcaggcttaagctggctgagggtggtgggttatgtgcccggggaggaaatgtacttcaacgtgtatgatttatgattttggatgaatgaaaaggcccgtccgcatcattttgtgaatatctgttgtccgtatattccaaaaccttatagctaccttacaggtatcgtttgtattctaggaaacccagttcagggagtatgcaataacccagttttagcacaacagatctccgggaaacatcccttttcaaggcaaaaaaaaaaaaaaagccgaagtcagacaagagtgatgtgctcaatctgaacatgcagacaatcaattcaagggaaatgtgatgccgattcgagaagaattctctgccaaattctgaggtgaatttccttacggtatctctacatccacccgtgagagagcggtgatctgatcattcttttgcattgtgtcaggcagcctggcctgcggcacaacagaaggtgtatcacccacaccgcgcattggagaaatataagattgtagccctaaacgtccgccaaaaaaaaaaaaaacaccaccgcccccgcgacttgccaaaaaagctcccacctcgtccagcgccgccggcggtctgcccccactgtatccttccccctcccatatcattccttgctcttgcctaatcttcagtcagcacagtgctgtgatgagtggtaagtcaaattcggatcaatcacggtacaaagtcaattgggggtttgggacaccggtggaggtcaccgcacgcgcagcgcgcgaggacgaggtgggcgcgggggagttctgggaggccatttttatttcgaaaaaaaatcgaaattctttttatataataatgaaaattgttggagaggctgagcgattaatgggagagttggtggagtttccagagaccagaattcaagatttaatgtgaggctggaggaagaaaaggtgaagattgagtctggaaacttggaatatttacaatatccaactatgcatcaacttccctcttgccgccgctgccatgccggacagtaggattccgtgacgtgacatgagttgggaaataaccatccaaccggtcacttacctttaactgagatattctaagtgtaatatgcgcatatgctagctgaagcggaaggggtgatttccctgattgttttgtggtactactattacaactggtgtcttttcttaaccccgttaagggccctcgaggacccccacaaggctgtgattgtttcgtcccggtgccacgcgtgccgtgaggtccgtcgcgctggagtggatgcgcccatcccaccgattcctttgtcggttttctcgctgttcatgcagctgaccaaccaattcgcggtccaaaacatgtcgtggtagtggtgtggaagcgcaacccaagaggcgggtgattggccatggacgcatgagagtccacgcagctgaagacatggtggggagctgacgctcgtgtggctgcggctgcgttgccgcccaaggcgtcttcgcgcccagcccgcgggctaaatgctgaacagttactctttatcagttatccttgcggttcttgttcttgcaattaaatccagatgcctttccctcgggcgacgctaggcatttgatgctccctgatccaatccgtagccgtcgaacctccacagaatcccgcgatcggacgaaccgacgcagctgatcgacatccaaatccacagtcgtcctcgaaaaggcccagccgattatctcacaatggatgcccaggcagctaccgagcccagaactcatagcgactacactgtgggatgggtctgcgctctgcccaaagaacaaaccgcggcgacagctatgctagatcacaagcatgtcgatcttccgaaaccacccaatgatcacaatacgtataccctaggatccatcggcaatcataatatcgtcatagcctgcctgcctaaaggcgagatcggaacaaattcggcggcgactgtcgcgacctcgatggccaacgcctttccgtccattaagatcggtctaatggttggcctcggcggcggtattccacccaaggttcggcttggcgatgttgtgatcagctcaccagtgggccagtatcctggggtggttcagtgggacttgggcaaggcgaaagaagggggcaagttcgagcggactgggtcgctaaacaacccacctgcctcgctccgcactgccttaacgaaactggagaccgaacatgaaatgagcggatctaagatacctcagtatctagaggatctaaaacgcaaatggccaaggctggcgctgaagtacgccagccgtgatcaccttgaggaccctttcggcgtaccggacgatccacctcgcagccaaaaagcaatccagggccttccttccatggagtctggggccaagcaagtggatgaatactgcggttggtggagatggcgggaagctgcgaaatatgcgtgtgcattacggtctgatcgcatccggtaaccaggtcattaaagacgctacgttccgagataggctcgacgaggagtttggtggctatgttctctgcgtcgaaatggaagcggcgggactaatgaacaacttcccgtgcattgtcatccgaggcatctgtgactacgcagattcgcacaagaataaagattggcaggagcacgcggcagccgtagctgcagcatttgcgaaggagcttttgcaatatgtgcagccaagtgaggttgtcgaagagcgtccggtaaaggatatattagagcaaggttagttattctccggtcggggtcactgtatatgttttaataataggtgtagttcacaaagagatatccgcaactcgagaagacgtcacccagatcaaatccaaatttcagaaagaggaagataaagaagtcctcgactggctcacgacaatcgactacggtccgcagcaaagcgactaccttaacagacggcaaccaggaaccgggcaatggctccttgactcagaaaagttcaagggttggctgtccgccagcaatcagacactcttctgtccaggtatccccggggcgggaaagacgatcttaacgtcagtcgtgcttgaccacctcggttccaagtttcacaacgacccgaagatcggcatcgcatacatttacttcaatttccagcggcaagacaagcagaagattgatgacttgctggcgagtgtgctgaaacagatagccgagagccaaccctctgttccaggaagcgtcaaagatctctttgacaagcataaggccaagcggacgcggccatcacttgacgaaatcttgagagttctccagtccgtggcggcgacgtgttcgtgtgtctttatcgttgttgatgcacttgacgaatgccaaacatccgaaagctgccgggagaggtttctctccgagcttttcaacctacagaaaatgcatggaataaatatctttgcgacatcgaggtctatcatggagattgttgatcgcttcaaaaccagcatatcactggagatccgtgcaagtaccgccgatgtggcacaatatctagaaggtcacatatcggagttaccatctttcgtccaacaggaccggcggctgcgagaagagattatggcggggatctcagaagccgtcgatggaatgtatgtacagaactgtagggaagagcagcacaggcactgacagttgcaggtttctcttggcacaaatctatcttaatttgctttatgataagatgacaccgaatgatattcgaagcacattggaagtcttccggaaccaagggcaaggccgagacgagatccagaaggtcggggcactaaccagtgcgtacaaccaagcaatgatgagaatcaatgggcagatgccgggttgcaagaagcttgcgatggaggttctgacatggatcacgtgtgcgaagagacagcttaccacgttagaactccagcacgccctcgcaaccaagccgggaaagtccgagcttgacgacggagacttgccatgcatcggagacatggtctctgtatgtgctggactggtaacggtcgatgaaaacaatggcattatccggctggttcattacacaacgcaagaatatcttgagggaacacggtcgcgatggaatccgaacgcagaattggcgatcacgacaacctgcgttacctacctctcattcaccgtctttgagaccgggttctgcacaacgaaccgtaagcttaaggagcggttgcagtcaaacccgctctacgattacgccgcgcgcaactgggggcatcatgcacacaaggctgcaacatcgagtcaagtggttattcactttcttgagagtaaagctaaggtcgaagcatcaagtcaggcgttgatggccaccaactggagccgatcatacccaataggcagtcaacatgttccaaggaatatgacgggactacatttatcaggatacttcggagtcatcgaggccgcagatgaactcctcaggagtagacccggtccagatctgaaagatacctgcagaagaacgccgctgtggtatgctgcccaaaacgggcacgaggccgttgttaagaagctgctcgcagcaggagccgacgttaatactgctgctgcttcttttgatggccggacggcgctccaagcggcagctggacgaggccatcttaaggtgatcgagaagctactcgcagcgggagccgacgttaatgctgttgctgctacttctggtcgctggacggcgctccaagcagtagttgctacttctggtagctggacggcgctccaagcagcagctagaggaggccatctcgaggtggtcgagaagttgcttgtagcgggagccgacattaatgctgctgctgctacttctattgatggccggacggcgctccaagcagcagctgaaggaggctatcttaaggtagtcgagaagctgctcgtagcgggagccgacgttaatactgctaattcttctaatggccggacggcgctcgaagcagcagctggaggaggccatctcgaggtggtcgagaagctactcgcagcgggagccgacgttaatattattgctgctacttctggtcgctggacggcgctccaagcagcagctaaaggaggccatctcgaggtggtcgagaagctactcgcagcgggagccgacgttaatgctgctgctgctactattgatggccggacggcgctccaagcagcagctagaagaggccatctcgaggtggtcgagaagctgctcgtagcgggagccgacgttaatactgctgcattgttctaatggccggacagcgctccaagcagcagctgaaggaggctatcttaaggtagtcgagaagctgctcgtagcgggagccgacgttaatactactaatttttctaatggccggacggcgctcgaagcagcagctggaggaggccatctcgaggtggtcgagaagctgctcgcagcgggagcccgacattaatactgctgctgctactattgatagccggacggcgctccaagcagcagctgagaaaggcttcctcgtggtggcgaatcgactcaaggcagccggcacattgagatgacaagagtatatattcatatgtcctttgtcgcacagcttgtttctacactttgcagaaatgctgatgtcgacttgatgtatagctttaatcggacacttcggtggtaggctgctacgaacagtcaaaagacgatcgttactaatcaaatcgataaaatgatggacttctctccacattctaagtcctctatacttttgttattattcgtgatacaagaggggtctggggcacggtgccaatctttaatgctttcatctcttctacagtcttctagattatatttacgttagtccgcttggatggcgttctcgctccgtataataatacctacaagtggcgtcgcgggctgatgcttcggatgcacccctgtataaaatacgccccacgacgtcacagggacaacctcaatagtatggtaactatttcgatactttcctcgtcgtagtgcctagctttaaccagtcttataaagttttcgaaacctgttccttagtgtttccaagactttaacgcggctttctcgctgtagtagacaagcctagcgaagaaaataaataagtactaccaacagacattacgcatcaaggataccgtttgcttgtcgtagatgctctatatttccaataaccatttgtaacttccgatcagacggctctagagtggtctggaacccagataacgcccgctgatacatcgcctccgctgcccccagtcggccctgatccgcgtaaaggaggtccaacatatgtgtcgcgttggtgatattacttctttcgaaatcgtactcgcgcccctggaacttcccagcccaccatgagcacctctccacatgcgggagaagccgccgctggagctcccaatagtccttagtcttgctgtcgggcccggagaatccaaccaccgtcatcgcttgccgcagaaacaatctcttcccattgtcatcctgtatgtgcgacgtccatctgtgcaccaccgggtgtatgctgtggttgccgctgccctgcacggaccctcgggcctcgatcatcgagtagcggagcagcagtctctctgcgtccaagaacctgacctcgttgcacgccatatcgcagagccatccgggctactgctccccaccgcctgccgaagcttgcagtagaccgtgccacaggtctatgttgtccacaaaagcccagagccgcagtagattcgaggcgtgctcgttcctcacctcgattgccttaaataacatcatccacgtcgtcccaacacttccttctcgtaatctaccaacggtaagcaagacgtgccgttaaacctaatcaagtcgtcccattactacttgtagagccgaacatacgacgcaacgttgaggcaggtcttgcggagatacgatgcagcctgcaccggcgcaagtggcagcctatcgagcaaaccgagtagctctgtccccgtctcgtccataactgctacctgtcagcctaagccccaaaacgtacgtcgttaaaggactacctagttgttgcctatactactgccggaacatagtattgcctaatttttggtctaccttattcagtcgtttcgagtcgccgaactccgctagcctcgataatcgtatagtagttagcaccgacccgtaattacccggaaggtactatcgaatatcgtatgtgcctgtcgacccgccttactcgtggtcttggtcgatgttatcgaagaccagtagccagtcgatattatccggccgcccaagccactctaatatattaatcaccacgactttcaggtcgtcctcgttatgtgaggcgcggttcttactcctatcgggaatctggccttttgtcacggtagttacaccgtgaccgtcgttaatccactaatggaacttggtacgtgcagagcatagactaatgcaacttaaaagactttgaatctcgctgccgcgagacgtgtttgtagctctttaagctacgtcttaacaatagagcttgcccgtacccgacggaataaagcctagactgtagcttagcttaatattactgttattaacctgttaacctgttttactagtgacaccttccggtatcctgcttgcacagccagcaagactctgtcttagctggtctgccatctggccagaagaccaagctgaacgcggcttggtggcgtcaagcaaagtcggcagctagctgtgtcttcccgatactactaagttcgtagagaataaatatcttacgccggtgattccgccgggacacatactgaagtgatctaaataaggaaacacatgataatatcgctgtcttttccttgagtactcccaggcttaagagactaacaactcattatctctatccagtccccattcacactatcacctaccagccacagatcttcttaccgttattttccatttatagcccttcggggtaacctgggaggccaaagcttagcttacgtagcggtacgataaaaggtttcctttagctatgccactgttacggaagaggtagataatcgaggcaagctacgataagtctgaccaatttaatgtagaagtaagctgaagagggaaaaaaagaaagcaaacaaagtctggctggaagcagggctttagatatggttaagtttggacctgtgaaagcatctacgtgactctcacgtggcatgccctgcagacctacatgtcatgagccagggccgtgatagctaggaaaggaaggcagatgggttgaggcttgcaattagctttctgactatgctatggcagtcagatttcattgccgacccttaattgcggctgaaagagcagtacgtgcttgagaaggggctggtcggtaccttcacttgccattgcgctgtgggaagcatcacgcaaacgccaagctgccttaatcagcatctagaataagctccatcatttcgttctcttacacctcagcttctcaaccccctaccgccggtatcccgaaagtcgtccagatcttacatgattatagcatatcaccccgatatcaaagatcccaagacccgagatttgtggctaggccagagggagcaaacgactatatacctgaggtgagggcctgggctgtgccgcagtgatgagctaagtctagcacaaacgcgcacggacatccaggcgtaatccagtcgttcagctgaatcctcagcaaatcgcattccttatgatggcacacagatgatcatgatttcggcttcagagatcgaagtggtaaatgtccagatatgcaaaaagtcatgcttcatgatcctttctcctgagagcctgaaaatacgagctcgatgtaccgaagtaccaatgttttttactgcccgttttattttcgattttcttttttctgtcggcgcttacatgcttcaggttccttgggagactgaggagtgtgaatgtagaagatagggagagaaatcttcctcagtttttggcagtatgtcttccgaaatctgcatcggatttccctggaaatgacagtctggctgtggaataacctcggattgtatgaagggcaaaccgccgacacgacaccccggtctttgtcgctgccatctgaatccaaggaccatgaatcggctaaaactaggtacctaaggtatctccttcatagtaaacacttaaaccccactaaacttcatccccgtcaacgacaactcccccccatcagccaaccactccggccccccactccactcaaactccttcccaaccttccacgtcccatgaaacaacatgccatttacccccaacccataaaccgacaccttcccccttaccaacgacaccacagccggtgtactattaaacgcgccccccaaatcctgccactcttccgcccacttctgcccaatcaatgccttatgctttagcctatcatccctccccacagccaacacatccaacctatccggcccactaacatacaccaccggagtggactggaaactccctcccaaatccaccaggttgttcgtttccgcatccccagtcttggtccagttgtagtattccatagttctgtttaccgttatcccaaacacaaaactctcttcgactgttctcgaagcgatggccagctgccccctgaagtccccccctgcctcgacccatcctgtccaagcaccgagccaagtggtggtaaataacggctgggctgtgcctcgaaacccaagtaccgccattctccacggtcccggtccacacccaataaccgggtacgatgacagcccacccccatgactctcccatcctgaccacccagcatacggcttgtagtagatcctatacaagcccccatccgtccctctgatcgccacgtccatttgtgaatcaccacacgctactgcatagggcggactggtaatcgccttcccaagctcagtccaagtgtcgttccatttcccgttgtaaaaccttttcgtttggatagtgttattctttgcataaacaaacacatccaccaggttgttatccaacgaagcggcggaaggctgggaaatcatgtcaccgcccagtgattcccagtcagagagccacttctcgccgttggtggtgcggtaccataccgcgttgtcttgcccgaggccgaagaggaaggcggtgggaggcgaagcgtactgcgcaacggagaggacagaggggcagatattgccttgacagacggaattggattcgaaggttggcgaggagtctgatgggcgagggtcagtgctggtccgtgaagctggggagaaagaaagggggctaccggttggggaagtagacgttgcgtttccgcctgaattgccacggccgcctgaagggtcgggaaaggcagttggttttccctggctgacggttcctccgggttcattacctgagtcacccccagaagagccattcgagctactcggatggatgagcatctggtagcaagacaaacaaggttgggaacaagtacctagaagagttttgcgttgccaagcgacttccaaacacacccccaaggatggcaatgatgataagaagcgccacaactatcccagccaggaaccactttgtcgccgatgatctcttcttgacagttcggtcaacaatagtagtcccgcctccgtcactgaacggccatggctgtgtagagatctcggatcgtggaactggtggactccaaggacgacttgtaggaggtgtcggagggtcaaagtccggcggttgtccaattgatcggtcagtattagccccgattgcggccgttgtagagttgtaggagggcggccattgacttcccgcggtagcagtgcgatatgatgttgttgacatggccacaggtgatggtgctggaaagaaagctcgacatgcacgaggttctggtgacgcttgttatccatagaatatcaagacatcatgatgcgatgtgcgcttggccgcaatgctgcaggctggtgatagtacgacgccacttgctgttctccgaacggctgagttgatgaccaccctcccaacccccacgaggtctggctgctgcatactggctttcagtccccatcgagataagcgcggaatttctcatcatctcctatctgttcatgctccatccttctggcggcgcaacaaaaactgaggtatcagggtctttgaacccggaagaggaggcaacaccaacgaagagttgttctttgaccgtccgctttcttcgtcgacgacagcgataagttcagatgggccttgacgtggaggttgtaagtcgtcctcacccaaccactctctggcctccctcctcagctggttctctctcattctcgatggaatgtgcacaaaagacacatttgtattctgtctggtcaaactgacaccgaatttgctcagcaaggcctggatcgggcctttcagcgaagggcagcatgcagcaaaaagcgagatgagctgctcgagaatggtccaggtagcaatcgacatggccatctcccactgatcatccacgttcctccaatcagcaacgaccacggccttcatgatcgacgcgacgctggccaataagcccatccctgtcaggatgcatatcacgaccctctccctcagcggacggcgtaggttccaaaggatgaacatcggagcaacagaaagcaacaggtcggtggtaatgttgattgcggagccgatgctggagactacaatgtctgtatggaggctgggacattttcgctcgcgcagagggaccatgatatcccaggcagcatggaatggtcgacatttgaagaagagatactgcatgtcggccacgcagtaggtgacttgaacggcagcgatcacgtataggcctatcctccatgactttttcaggggtaatcgcaacaaagtcaagacaatggacgtctttatcaaagtcatgctgatagcccatatcggaatggcaaaatatgccaaaaagacagcttctcgaacttcgtccatgctgatgtctccggggtgtatatgcatctctgggacgaggaggccccagtcgataatggagcaggcctgggattaacgagtcagacaggatagaaaaggcaagctcgagttcggcagaattaaacctaccagcccagcgataatgaaggcatcatcccatcccagtctccagaccggccatattcgcacatatattcttgcacaaaagggaaccaaagcaagtgccaggagtgggacggtgactccgaagtggaggcgagccaaaaacgctgccctctcggtgatggtgggtgccatcgaggtcgttgaggcgctggattcgattgcggtggttgcgtttacaccatggtaggatgaaatgggaacaaatgcgaaaatagacccaggagcaattggagatggaagatgtgatagatgatcaaaaaaccgtgctttctgggcgatgaaattgcgccaaccaagttgaggtccagaagccggggctgttcccaatttgaacaaccggtgaactggtcctgacatttctttttctggctccccggtccatgcttgacgatcggcacaatcatgacggggacaattcgagcttggcaaatgcttgacaggtaaaagcctccgctggcacggcgctgatttgctgaatgtcgcggtgctggacccggggatcagggactgggcacggcaaagccaggggccaacatggggaagcgaaattggtggctcgatatgctcttcgatcactaagaaaccgaggatttgccgactccaagcaaattgggaatcaagaaaatcccaagccaaaaaagctcaggaggtgccaaatgtactcatagtactccacaagacctgtctgtatcttgctcctcccttttggtcataattggcaagtttccgccaccgggtcttcaagggcctcgacttccataaaccataaggtataaacggatcttccatagatcgccgccggctgctatgtcccaatttctcactccttcaggacgaatctaaccagaaatgcttcagttacatccatcatatcaaaatctcgttgttttgccgcggtatcacccgacctttcggcgccgacttcggaagatcacttttgaccctaaccctagcgcatgtccatgatatttagttcttgtaccgatgaaatccctacactgagctgattcttgaacatatcgataccacgctggatctagacaagtatacctatccgagatcccgatcattttgcatgtcaaatcatgcatcagattgccctgatgctaccttcaagaaccaaaacagccgcctgtgattggtcagtgagccttgatccacacctgcaggaggtgcgccgtttaaaacttttaccttgatgtcgacatacacaaactgacgaatgatgacgacccctgacgagatcagactccatactctgtaaacactcatccgattgtctcagtatcaccgttgaagcaaagtctgcagtcagaaaccactgaactcggaggcgcaaaccttcaagaaatctcaccctcaaccccgccatcaacccctcccccgcactccctcacatcaccacacacacacacacaccaaaatgtcagacccctgcaaaatcctcgtcttcgcctcaggcaacggctccaacttccaagccctcatcgacgccgtctcctcgggcgccatccccaactccaagatcatccgcctcatcgtaaacaagagcaaagcctacgccaccacccgcgctgacaacgccggcatcccctgggagtacttcaacctcatctcccacggcttccgccaaaagggcgagaccgacccggccaagctccaggagtcaagagacaagtacgatgccgccctcgcggagaaggtgctcaagggggattacaagcccgacctggtgattttggccgggtggatgtatgtctttggaaaggctttcttggatccgcttgaggcggaggggatcaagattattaacttgcatcctgcgctgccaggtaagggttattgtttgtttccatgtgacaaagagtttggctaagacaggtttttttcttgtaacaacaaaaggcaagtatgatggcaccaatgctattgggcgggcgtttgaggactttaaggccggcaaattggaggacaacaagacgggtatcatggtgcattatgtcattgcccaagttgacaggggggctcctattctggtgaaggagattgagtgccgcgagggcgaggagttggagcagctggagcagaggatacattctcacgagcatgagctgatcgttgaggcggctgccaaggtggcaggtgagatcctggacaagaagaacaagacacaataaaagacgacaggctcgagccgttgattctgcccaggcatcccatgcttttaccacgcctcatcatgtccaggatcaagacataattccacgtgatggaagtattaatgctggtgttgagcaaagagacgttttccaatggtgtctcttggaggtggtgaggttgttgggtgtttggggtttgggggtgcaggttgtttcgagcaaatttcgaggggcgatacttgggaagagaatgcgccccggctgaggattggggttgtttgcttgcaacattgcccttcaccagagttgactcaagtgttaaactgtttatttggcagaaagctctttgaggaaactttgccatcacaaactagtagccttttgtgtgccaagaaacgcatgaaagcgaggtgattcaagcagggaatcgtccggagccaacctcacctcaccgtcacgtcgagcatgggttttggaaatctcggccctggattcagatcaacgggcttgagctaggtgataaatttacggccagatttgggcaaataggttctcttgcattactgtccatctcttctctttcccttgagcaaaaccatttcgagtgcaaacttggcttccacctcaacataaggtacctgtcagattaacccactcaagagaacaaatccgctacctatttccctctaaagcataacatacatctggtatctggaaaagcccgaaagccatcttacgattcataatcatcccgatcctactcctccaactcatccgtctcatcatacccatcgtcttccgagaaatcatcctcatcgtcttccgagtcaccatccatatccacgtccgaaccgctgtatcgatgttcccaagggcagaccatgctgttgttgacagatttgatcatcgccgcgagactcactcggtctgttgttcctctccagttcttgcgggcccataggggtttcttggcaccatcctgatcagcctcgaatgtgatgagatcttgccagtgcgcaattttcggtttcccatgatagatgtcactcagctccagcacccttagcttaatccctcgaactttcttcaagctattgaaaaaggcgacccacggattcgtctcggtttgtgagtcacgctctgagtggcaaagggacacacgccgcaggcagaggtgtttgagtgttgggctgaacttggtgataagggtgaggaggggttgaggggccacgcttatccatccgatgtcaagtctttctagattcgggaaggagaccggctttctatcgatatcattgagaggagtgtctgattctggctgctcaagccatttgaacaacacgggccccagctccgtccgatcatgcggtgatgattgatgattgaagttgagtcggagccatgtgacgtttcttgccatggtcaaaaagtcgtggatcatgaaaaaatggtccttgatgcagaaacatagatgaagagtcttgaggttggcgaggatgggcgccagctttggttccaagggcggaggtatggcaaaggcgctgtcatggaggccccaatttttgtcccttaggttgacctcgatagtattaggctgagcaccagaagctcccagtgcagagataatggcggtgaaaacccttgtggggtatgtgtctgacatcagctgcccgttgtctacgccggtctccagcctcaggcctattgacttttccaaggttgctgcaccgtaactccgccaagatccgttgtctcgattccgagtctcggaattgaagtcccttaagtcaacggttccgagatgtgggagcgccgcaaaagcttcagcaagcatatctcgcagtaggcccgtagcgaacaaattattttgctccgcctctgcgcgtagccaaatgcgatgcttctcagctgggagtttgtttgcttcccagctgtttccaacccgatccgtgcaaatgatgacactatcccgaaattgtgagtaaagtattcgcgtctatgtgttgtctagtaggcatgtgcttactgcttgagaaagggagcaagtgtgctgtgcttggagatagatacgagggtctgcaagctttggacagagaccatgaactgtctcttgcggaaaaactcatgtgcaaagaaattgaagaggttcctctcaagacacttgcaactcaatcggacgttggcgaggtcactggtcctgatccagcgagtgatgcgcaagagcaactcgacagggacctgcgcaagataagagtcctcttgaggattaatggcgcccattatcgaaggtatacctatggaagtgtgtggtcggtcttcggttcattgggaaacaggttgattaatataagtgtcggttgtcgttgccaaccacgtgccgggcgagcaagggcaatgcgcggctaagtggggcggtttaggcagtagacgcccccttgcggggctgcttgtctagcatcccgtcctctgtgtaaacatcacatcttcacgcagaccattgaaatgtatacatagagttgtgaataactgtttggatcttggagcatattagactcaaaagtggggtaatgaactggataccaagcttctcgatgttcagttgacaaaccactcagatctgaaatcatgagttgaggtccaattgtcttatacagttgtcaatggtaatctatagtcttcaggttactatcatgaaacctgacgtcaagattgtatttatatcaggttccatattgtaggggtcccttgtttctcccttccaatgccaagttccttgatccaccggcccaccactgctgcctatcatcacatcactccacagtcctcgaataccactgataataaatctcttcacttccaatcctcgaaccttttatctgccatatattaaatctcacatcatgtcttcaccacccgagccctgcaccggcccccaatgtccaggcggctgcaccaaccaagactgcccctcaacatggtacccctacacgacccaagaatacaccgccatgttcctctcctactacaaattcctcacaaccctctactactccccgtcagacctcaagattccaccccctcaaggctggcctaatctcacccgtgaagccggcatgccgagatattacaagactgatttcgccgtcgaagtcatgagacacctcccctacctcgggggcaatcatcactacgagtacaagtccatcatgatagactacagcaccctaaaccccagaacatccatgtggttccaaccaaacggcctgggaaattatcccaaggatgactggtgggaacatgcgtggccttacgatcttcctgcgggccaaaaaccgccgcgaggagactccctcatccctttgaccgtcggatgggaaagtggcggcatcgtcttgatcctggacgttcaaagagggaaaatcatcgaagaggagttgagatgcgacaataagatgtatgatgcacaagagtactttgacatgatggcatgtaagttcaggaacctcgagcgggtcccctgcgacgggaggatattgggggagtttggtgaaatgaaagagagacaagagccagtaacagaggaagagtttttgggacaggatcctaacgaggggtgggggacagaccttgataaggcttatatcaagcagctctatcgcgagcatgggtggccagacaatttcctcagggaagagtgcttctgggtcgtgaatgatttgatggagatggtcatggagacaagagacgacgaatgggaggcatgggatgaaaatgacttcgtgcgtgcgcgacgataataaatgtaccaagatcaagattcatccatggaccacacataaactgttctgctgaggttaaggttgccatgctcatggcatcctatctcccgcatatgccccacgcccgccgatcaaaacaataaactcctccggatctcctgcgttgaccttcccgctctggtcagcccccccatccggctgaacatcgtcatatgcgaacgcatatcccttgccatcaagattgcactcgtgtacaattcggcaataatggttcgtaggctcgcagcagtaaaacgtctccggcggagaagggtgctccatgatatccgcaatacagctcctctggaacgcagccgcaagtcttggaataatggcgtttcgttttggtgatgggcccgtggtaaagggcccactgttgcaacccagaatatctgccgtggtaggcttcgaaaacgcctctcctcctatgatgagctcgttcttgccctttggaatgcacccactcaaaacccccattggcgtttgcgtgtcgacatgcatctcacaccctgtttcggccccatggctttgctgactttgactctgacccttatttttgaaccccatgaacagagccgacagcctattccgcttcccatctttctcagccttgatctcctccttatgcccatttgtatggcccccctccaccccctgagcatacttcctccaagctctttccaccaacggctcaaaaaacccgtcgaatttcacccccgcagccccagcatgagtcggactcagcaccctcagcacttgaccaccacctcccttcttcataacaatcagcctctcccaaggccacccatccttcttcgtctgctccctcaacccctgacaaactctctccaacccatcctctgccatcccactgacatgctgcaccttcccacccctctccttgagcgtcaacccagccggaatcccactcacaaaatccacataactgatattggcaaacagctgcgctggatcaagcgtgaactcacagaacccaaagttgacttggttattcggatcagtcgggttcaaaacagagggctcaacaagcgccgctccaccgccaggcccgccttggttgcgcaagaaggttaacggcgtgtcatagctgtaccagattctaccgcccgctatttgagggatcgtcaccacactcgagtggctgccgagtacaatggcgcagtcttcttcaagaggctgcagaatctggctgggattagaagggaagtaaagggagctgtcctgcttgacaaaaacacggcgggaggagtgttggatcgcgaggccggtgatgtaagcgtagacggtagtgcccgggggggcgttgttaacgagtgagactttgagtgaattgggcatcttggcaactggattgcttgatagttgaacaaaaaatggatgttgctgatcaaggggatatcccctggttttgttgctgcgatttttcagctggcaatgttgtgaggggtggggaaaggtatggggttttggccatcgttcgttgttgtggtggagagctgatgttgacgctggtgttgctgcaggtgcacccaatgcatggcgccagatcttgtttttgagctgagatggaaaaagaggggaattatgacttcacttcgatttgttggagggaagctgtaactaagttgctgaatattatgttcagtttcctcggcaagaatcgtgacttttcctctcttctttggcaatgccaaaatgtgcttttgccattaatattttgagcatttgatggttagaagaaacaatgacgtcgttcccaacccctgcatcaacaacggatgaacgattcagttccaccaacgatctatcacgtgcttgtggtccccaaaaagctggaactgttccaaactggccaaccatatgatgtctgtgctctatgtttcagatgctgaggaatcttggcagtggatcctgtctctgaccctactcggcatttgacgacctcgacattgatgaagatggggggaatgcatttcctaagagcaccatgtttctgacattggtccgcgaagaagtcaataatttgctaacttgtctctttccatctttaacacttgtttccaaacgaccattggagaagcctgagaaacgcggttccagacaggcagcggacgatgcgatgtggaagtgtgaccaggagcttttcatccttaaatccaattgtcgagctcaacatccgtcgccgcgagggtttaatggcttcatattacacatggggcagagtatctcactacatatcctgctgctgttacgaggttgagtgcatgggcgagctaaagcacgaggcgcagaaaaacaggacggctgtggttataccaatggaaggaaggactctgagagcaaccaagggtttgtggggctttaaagtgccatgctaattaaaccgtcttgaaatgtttgcttgcatctgtgccaccgggcgagagcaggtcatggaggcaacggccactgtccatcagtcgacaggttgtacctgtgagcccttgatgccttgtgtcccccggggaggcagattctaagacccagaactcgaactgatcgacctacttgtgcaatgccaacctgcttccgatgccatgcttcccccttgtagctggagacttgagtacaacacatcatccgcagcttgccgccagcattctgggaatgccccagcttggccatgcatcgaaggaggtcatgttctgcggctctccgcccccattgttgtaaccctgctgctttcttgggaaagattcctttgcctcttgtctctaataactgtcaccgaagacgggccagaccgccagccagcggcttggatcaccagctccattttcccttcggcgcaacggtctttcgacgacaacaagcggcacaccaacaccattatgatggccatgaaggccctgttttgcatccaaataactttcttccgtttggcatatgcccactggcttggccaaaagcccgatggtccccacaacaactatggcctgcccgaggccacagcaacatcatcaccagacgacatcaaaggttggtcgccaaagccaaccgagccacccctcccaaaccatggaccagacatcagcttcatcgagttgatgagaagaagcgaacattggataaaggccaagcggcagacaactcagtatctgaactcgaagacgtgcggctattttccctcagacgaatgcaagttgtcctctgtctacccttcaccccgagcctccctaacaaagcccctatttcagttgacccctgggtatgccccaactcagaaacatgcaccaccaacaccaacaacgtcgttgcgtgcctctcctcaggcgagacagggccattcttcagcgtctgtttcgactactcagcctacaagcagggtctatgcgacgataggagcgcagacaaccccgaaactgggtgctggtaagtcgggcgcctttacgtcacgaatgaccagcagcagctaacgtttcttgaacaccagcgcatcgtcaacaaaccctgcatgtgtcatgtacctctggcccggcccccaacccaaaagcatgttcttctgccatccaagctcaacaatcatcaccatgctggacgtcccgcgaagtgtactcgacgcctccaccagcagcacctcaaccgagccaccctcaactacgacctcacctccccccgaccccacgcccccgcctcccgacccatcagcaatcaacatcgatgccataaccggcggtgtcataggcggggtagccttcctgtcccttatcgcagcagcgatcttcttccttcaccagcgtcgtaagaaaaagtcccctcccagccctcctcctcccaccaaccagaattacacccccgtcccacccaacaacaaccctactcccaatcaacaaccctactcccccccccgacgaccagacttcctctccctcccaagtagctcaaccctcccctcctcgaccccctacctctccaacatcagccccccaaccggcggcgacccatactttccccaccaatacgacccttccaaacaacaaccacccgaaacacagcagcagcagcaaggctactttttctacggacccggtagcggtgatgctggcgtggggttgtatcctcacggcacccccaacacgcagaactcccattttgaatcgcagtataccacccgtcctgctcaggggcaggaatcctaccaaccctacacccccccgcagcaagaacagccccagctctccgagttagacagtgatgacgtaggaaaaggccagagcggtaatccagccgagatgatgggcagttgcgccgagcagcagaacagaaacagggctgagatgccggaggagtgtgacgcagagagacagagtgcaaatccagctgagacgcccataataccagagccaagagtagatagccaagctcacgcctgaaaaaaacggcaagataagataaggggattacattgtttcttgcttgacttcgcacgatgacctccagcctttacacccccttcttctcccttaaccaatgcaaattaaccggcgtaaccgcctctccaccatccctcaccaccctcaagatattcctcatactcaactcctcaaatccgacatgcgtctccaccgtcccgccagcgttgtgacacgtcaacattaccctccccggatgctggcctctgtcatcaaaccctaagccagtcgccatcctcaccagtctctcgttcacactgggctcatccatatgaacatccaacgccgcagcccctaccactccactgtccaacgcatccgccaacgcctcctcatccacaagcgacccccgtgcaatattcacaaacctcgtccctggccgtaggtagccaaacgtctcagcagtgatgatcggtctcccgtccgcagaagcaggcgtgcataacaccacgcagtccgataccttcatcaggccttccaacttctcgtagaatgtagctctgagctcagaatcgacagcagcaggtttcctcacaacgtcatagtaagcaatcttcatcccaaaggccggattccccatcttagcagctatctgttgccctatattcccaaacccgatcaaccccaacgtatgccctcgtgggttgtgactagcagccgtggctctcgcgtggcattcccgaaaggtactcctggcatcgctcgaggacgttaggtagggaaacgtagcggcgttcatgcaccacggaaggtgtcgaaaggtcgagatgatcatggcgacggaaaagtccgctactgcttctgccgcggcgaggcccgagttgcagtagattatccctgttttcttccagtcagcttgcggttgggaaagttctacccagcaacagaaagcgcacctctttctcccaggagtttggtatccgcccagtcgaacccggcgcccgcgctcgcaaaaactttgaccgacgaaggcaacaggtcaatgagctcagcatcccaccgtcccatctctcctcctgtgccccagaatggacggaaaatggcgctaaagtgaccccatcttttctctttcagggcgcggatgagctcgtttctttcgcgctcgggggtgggcggccggataacctcaaaggcagcgttgaactcggcgtaggtgtccgggttgtacttgatcgggtcgccaatatgaaggactatcggtcgttgtggttttcgagtcgcagtatctggtgaggaggtagttgacggccagagagggatcgtggctgtcgtcgcattgggtgtcaagctagggattgagtactgttgcagcggggagcttgaccgcggggttgatgccggtaccggagtgcttgccggcatgggagtgtttgtaggctctgccattgtcgacacaagatgtctcgaccgctcgttcactgcaccacagcccaatttttggtgtttgacgagaggaaaagaactgggcaaattcatcctgcagtcagacccccaacaccttttactttgcgctcgcaataccaagggtgcaacgccagcaaaagggggccagcgcggcaatgcagaaatcccggctagctctgccgcgataagcctgacagtgagtgccaaacccggaaattccgggagcgttaggtgagcgttagttcggatgacatccgatcagatggtgacaataggatcgtccatcctgtcctctagccgacggcccgtaccaccacagaaacactgtttctcagcagccagtcggcgattctctctccgcattttgccctctgtgccgtgttcacaaggagctcctggcgtgagaaaacagctgatgatcatcaaagctgtcgggtcgggcggccgtagttgcagaaagagagccagtaatacatgtcttccaccacgctgtgaaacagtggtgttgtcaccaacaagttgggggtgcggggtccgagaaggtcgctaaaaacgtgctatgcgagccgagccgtggtggaggatgtgggggagtttccactatgacattgatgacgaattaggtgggggtccagttgacaggacctcgggagccgcaactttgatgagcccaaagagctcagggatgggtcgttgtctctcacctcagaggttggatatcatagatgaccaatggtaccttatattgtcgctataacggtttagatgccatacgtaggcttatcggctgcgtggttacattcacatatgaacctttcagccgcgtcatatcccgtctccgccgggatctccatgggggtccatgacaccggcttttccaagccattcccaccagtccacgttgtcatcaatatccatgcctggctgaaattcgccagttatatctcctgccaaggttggactgacccccatccaaggttgaggatcaatagccatgttcggcattgggaacgacggtatattagcgaaggctgctgtggaaacactgtgagtatttgatgggttggtaagagggttcggtcttgatgcaatcccctggtagccaaagttgaagccgcttggagcttggttgttgttggtgtgaccaaatccccccaaattcgctccgttgaacgaggtctcgatgccagatgtttcaggtctgctgtaggacataccaacgggcttggccgccacaagtccttgccatcgttcccgaaataattgggcactcagtgagtctgggaacggcccatcacttgcgaagggcgttcgtcgtgcatcttcttcttctagtaaccttgctctgaccggatccttccgcagacgttcaagctctgcttcccgatgttttcgtgcttgggctatcagccggcgtagtggtgtccaaaacctcgggcccctttctaggctcgacttgctggggaccagatattcgctgtgaagagccaaccatgcgcgctcaacggtcggcgaccaaggcctttgcgtgatctcaagaagaatgaagatgatagcatgccaatgtgtataagaatgcgatacccagctccatcccttgatttctgtctgggtattgatggcatgattctgctccgtgatttcgatcgctgacagcaggagcttgtcgcggacctccatgggcatatcttgcttgtttggcgaggagaggagtgcgggaaagtgaagtatgagccggacctttgcgacaacaagacgtgcaacggtaattccaatccagtacttgatatcaggctccccagcttgatgatgtcggatataacgctggtcgaattttgagtagagctcgtccagaatccggtccatatctctgatgccatcggctgttggattcatcattcggcgcatcatgttagacacctcatagcagtacagagcattgctcatgtctgtcatgccctcccgttccgcgggaagttccgtcatatccgggctgatatctgagtcgttcacattcaggggaagctttgtgtcgaaagtaccatgggatattgtgacctcggtgccttgatcttccgatgtcctggcatcaaggaaacaaacaccccaccaaactcggcgacgcatctcagcttcgtacggtgaaaggcctttcatcttagcgtcatcccggttgaggccaagagattgggccatccggatcacaattccagtcatcatccagacaaacctggggctgtcgttgcagcggaccaacaaaagaaatatgagaagcgcctggaccacaatgaggctgggcgagccgagaaagttcgtttttgcaagagcatgctcaaaaccggaacgaaacttccgtgtgagctcatctttggtagacccgagattccctgctacctgtaaagagcatcaacataaatattttcaaaatatcaaagagggtcatgctcacatctggttcttccattgacgtgacagccgcaaagtaaatggcaaacatcaaggtttcctgcgccggtccaagtactggtggggctccatcatgcttcggtaatagaagctgtttgacggcaggcatatgaacagtttgcatcaagctgttgacattctcaccaaataccccaagcaaaaagggtacctgcgctggagctggatacaagtgatagatggatgctccgctagaccctagactttgtcctagaaaaacagtgtgcctcggcgatgagacttgagtagcagcagtattggcatttcgaaatgcatcttcgggatccgagtcggagctatttgggtcttcttggtgcaatgctccggtttgagaccgtaagaggtcaagctgttgctatcagcattcttgtctcgacgtagctggcctctcaatctcacctcgtcatagattctcgagaatatgccacttctcacgtggccctgttggtttgtatcatccaatgataactgctgggtcatctcaacaggtgacttggacgggttgttggcgttgcgaatagcggcttcaccacccaggtctttaacgagctgttcgagcttttctaaccgttgcatgacatgagttgcatctgccttttgcgaacttatgtttggtaggctgctcatgactggtgtctggggtggtgctgtgcttggtggactagtggtacagctactggcaccaggagcggcccgccgggcccatcgaggtgggcggtacggagccagaacacaagcaatgccataacgcttgcaattcgaacatggagacactttgtcgcactttacttttctggcggcagttagcttttgtcaaaaggaaattagagttcaggaattcagcaaagtatttgaacagtacctcgcccgacatgtcacgcaacttctcacacgtgctggttgggacaggtcacccaagagtgaggaaagatcctcttgatgttgagaggcgtttaaccccgtattgagactcggtatttgcgggagagagcgcgacattttgattacttgtgtcagattcgctatttgaatatgaattggagttctgctgttgtgaggatgagacgaacttgcgaagttgtttgtcaaagacccgcatgtttgctaaagtccgaaggtctgtgaagcgaccaatcacaaagcctatgcagtctacaacagggttaaatgggcccacttcttcgcgtttctcggccacttcggctgccaagagattatggccgaccgggcagttgacggatcgttactgacatcagccaggtgcccaacggtcgacccaacgacgacagcattccgagttaggttttgaccacaatgcgtttaataaacaccacgacgctgagactggaatcgccatggtccacgcccatttacgctattttgtcacacacttggggggaggatgaggtcctcttcgccgatatctgcgacccacaacagctgcttcctgtccacaagaagggatttcgcaaggtcagccacagctgtgagcgtgctcgccaagatggttacaactacatgtggattgatacctgctgcatcgataagaccagtagtgccgagctctcggaagcaatcaactccatgttccgatggtatcacagggcagacagatgctatgcctacctctccgacatcaatgttccaggagaaccatcggtggaacttgagaacagccgctggtttactcggggctggacgcttcaagagctgattgcgccgcgagacgtgcgcttttatgatagccaatggtgtttcttgggaagcagacagctccttcgcggcacccccatcgccgacatctctgagctcacagatttggccgacaccatcagcaaggtaacgggaattcccgccgaaattcttcgttggttctcgccaaagccagactcaccactggtgagacggcggagtaaaaggggagggctcgacaaatacgaaccaacacacgccctagacaagcttttgagggcctgtagcgtaggacaaatcatgtcttgggctgcttaccgattcaccacaagaaaagaggacgaagcatactctcttctgggtctctttggggtcaacatgccaatgttgtacggagaagggcgcagtgccttccaccggcttcagcaggaaatactaaagacgtccaacgatcagtctattcttgcctttgaacgacagttttactcggatagcagttcgctactagcagattcgcctcgatgctatgcctcgtcggaaattatacagagtttgaacaatggtcccctcctatcaggcgcaactccgtttttcgaattatcgccttctccaaaggccgtcgaggccgggttgcttctttgcccactgatcaggcagggcaaggaagatactacgtgctacttggcgatcttgaactgcatctatcggtccgacttcaccagccatccggccataatcctccgcaagattgacagcaagtcccgcacattttaccgaacacccaaatccgggctacaccgaatcactcccattaacgaccaaggtttgatagaatggtcaactgctgttgatggaggtaagcacttttttctacggccttgaaaccacaaagcttatcaagaaagtgcctagtgtcgaaccgattgcgctatgatctcaacaaagtctacttcgagacgatccgtctttacttggagcctcctcaaatcctgtctagcatctcgtatggtgttggacaaccagcttcaagctctctctctactccaggaatgaggatcaagcttgaaatgccagacacaatgagattttcttctggtgcctatcctcatatgttacaggtcacgaagaatcgggtttacgccccatctatcacgctcgatagttggcccaagcggtttctggacaatcaaaaacctatgacgaactacctagcgctcttcggcactgttcttcttcactttgaaggcatgggtgcagttgccttgtcatggggaaagtcatgtgctcctgaacgtggggatcgatctcctgagccttttattgcaatcatggactgggccaaagttgtcagagctgcacatggcaaggagttagagctttttgatctggaaaatttgcgtttgcggactaccgccgagttcctttatgcgacgtattcgtggacatgggtatctttgctggccaccaagccagacatccgagccgaacacgacagccctcgaataaaggtgcgatgcaggataaggaccgtcgagtttttaggacgacctctctttgaactggagctttcagttcttccccaaggcagatcgagtttcgttggcatggtacgatcttcattttcatgaggcttttgggctcagagcgccacgccagggtgaaccgggaattcgcccgatgttggcggagccagatagccgtttgcctcgaccggtttctgctgttgcgggttcttctttccgaatccagatagtcggccatcggaaacataaacgacagcaaagacaacttcaagttcaagacctcgatgtcaggttaggaaagcgcaaacccagttcgtgatggattacgctacccttacaaaccgaccatgcaagatcaggaacggagtacgacgttgcggacctcttcgctaaggcacagttgggccgaagaggaaggcgatccacggaaaacttttatcaccttgttcttggcagccacagaagaacgattgcaaattcttacaaacgagtccttgaagcgcgccattttcaaagttaacaagatttcagaaagtgccacgcgttactgcgacccttctgaccagaattccactcatcaaagcgccggcacttccccaattgcggatggtggtgctaacgggcggggtagcatgacccaaagttgacatatttgcggcgtactagtccattcggtcggttaagtcgaagggacgcatcttccgcaataacctaatctgtaggtaagcctctcggaaaaaagtctggcaggttcaacgtcgcagtaccaagagacggcacggcagaatggatcgtcaacccatctgggcaccgccttgccatgcatgacggctacaacgagcaggaagtcaagagatgaggagttaccctggagttccatgaaccaggaagggagacagctgtcaattcccggtaatgcacgttcagtccggggttcagacggcatcacggcatcgcgattcttttcaccaacccaagtccggggtaaatgaggcgtcacttatcttgcaggctcgtccgagagatataaatcacgcttgccccatgccccggagactgacatcatgctccacaacctgtcacttctcttgctccgctcgctagcaacactactaccggtgcctactaccttgcctggctgattgactgctactcaagatgcgcatctccaccgtcctctccctggcaggtcttgccaccgcggcccctgttccagaagcagaagccccaaagttcggaattgcaccggctggccaaggattctttggagccggtcaggtccgcactctctggaaccagggcgaccactccaaccttgggtgcctgaccaacaccggcctctggaccacgaacgaaagccaatgcggcacgtttgtctccaaggagctcacaactggccacagcgtgaagacattccaactattcacttcggctggaccctgctccatctacggcgcgaaattctactgcgacaagaatgcgactccctttctctttggtgtaagtctctatactaccaccaccaagctccgtacccccgatgcataaactgacaccatccacagctctggccctggcccaactccattcccggagttgactccctccgcgcaggccagtacggcctcatggcaacctttggcaacaacccccctctcaaagaggaaggtccccaagagattcactttgtcacatacagggagacgggcaagtacgtctggcttacctgggcgccgctgcgaggagggccgattttgactccggttcccattgaataaagcacccacaacaaagtggggaatcatgtacataaaacacaccttacctacctacctacccacctacctttttcctctctccaacttgtgcctcgttgctgtttcccctgaaacccctattgtggatacgtagtctggagcaaccgtcaaaagtggagcccgcggagtgcaaagaaaaagacacatgtccacacactccacaagcacccggataaaagcgcaaaattggaatggggaaaacaatgagcaggaatatcctctgtggcgcaattggctagcgcgtctgactgttaatcaggaggttggaagttcgagccttcccggaggagattgagttggaaccatttgtagtggttcgagttcttttttcatggttttggtctcatcatatcgcctgattagcataaaccatcttctggcttttgtttttgtcttgttgtctgagcttacggtggacttcatcccaacgtaaggcgtacttcattccagcatgagagagattttatcccagcttcacatggacttcatcatggctcgatgtgtatacaagggcaccagttgcttgtgtataatatgtggcttctattattacctttcagcaagacctttttggctgggagctgttcccatcaacgatatcctgttcaccaaaaccttatacgtcattcgtctgttacatactaggtacagacaaaggatcccataactgcattatcctttctttctacacatgtcaatctcacaatctctcattctcatccgacatatcatattcccccgtaacctttcccatcactcccccccattcaccccctccccctccttctccctcctccacatctgcctctcctcatccaccacccccggccccttataaacactcccatacaaccccccagcccaaccactcccctccccagtcgacgtcttactcttacttctcctcctataccaccgtccatacaccaacaagtaatacagcctaaaacacaacaacgcccacccatccctctccagatccctcgggtactccgcccccagatcaaccgcagccgctatcccgctcatcaccgcaacctcatgcgcattgatcaacgtccagctacccgcaaacctgacatgccttctcccctgcaacagccacaaccacggcacaacaagcaggtaatgagtccacgaatggcaaagctgatgccaccagtccttgcggataattttcgtctggtcaatctcattatcagtccagagatgcccatcacgttccttgttgaggaaaatggtctggaagacgtggttctcgaacgggacagagggcgggaactgagcctggtagttggtgcagtcaaacgacatttccagcttggacatgtcagaagggtagggcttgatgtagtacattggtttgaagctgttcatctccccgtagtcaccgcgggcgatggccacccgagtggagtggtctgttccggaaagagtggtgacggcttggtcgggggtgaaaaagttttcgtagtgcttgatcatgtaggacgtgtcggagtgggtgatggttagatcgttggaccagatagcgcgggggaggataaggcgttcccctttggtgcgggatttggagaggaggcggtttgcggtgtcggcgctggaggaggggaagacatgttagtgacagggtaaggatggcgaggggaggttgagcttacaggcaacagaagacgacctcatcgtagtgctcgttggtttcgtcggcactgggggtcggcgttggcggtgtaatcctccggtgtccaagcaccggatgggttgtggttgtcaggagctggatttcgcttgatgagctttaccacaacgccgttcttgtcccgatagagggtctcggtgagctctgtcgacagacggaccttcacaccattcttgatgaggtcttttctccagtcttcgtagaattgactgaagttgggaaagacgaccatcggaggaaggttgctcgctatactttccttgtccggaggataccacatgccgtaggttgggctggtgcacagccgttcgagaatgatggtcggcacttcgggtgtgtagtttccagttccgaggaatagggcaaccatgggaagagcaacggcattggcgaactcgtagctgaacatgaagagcttcatgagatatttgatggggagcagggcaaagaatatctcaaaccaacgagtcagagtaagcatctggacaaaacgacgaatctcgttctggtgtttctcgagcagcttggtagggtagacattggtccagaaccgatctcctttcccgaaagacacttgcagcttgacaggattggcaacatggccctggcggccaaacattgtcatggtgtgatggaagatgtaagagccaccttggacgccttggttcagccatgaggcaccgtgcttgtctttgtcaatggggatcgagaaggcctggccgccgcagtagttggttgcttcgatcaaagtaacgtcgaacttgtctgggtgttgggcgaggtgatgggcacaggacatgcctaagaagttgtcaaatcaaggagaacaaaaacaacatgcggattcgattggtgttactgtacctgcagcaccagctccaacaaccaggactctcttctttttcgggcctttggacatggcaacggacagcagctatcacgaactttctggaaaggcatcaacggcgcctgtttcagtgtaagaaaagagcaaatctcgtctcaaaacatgcaagataaaaggagttgttgagatgttggtcgtggctgaatcacctgcgtcatggccgctgtggtgtctttgacgatttggagcggcgccaaagtcaaccaagatcggtggcgcaagcgatggcattttgattggactgaattgacgagcaaatgccgattgcactgcatacaggatggcgacaacggagggtgtcaacttcgatgacgggaagtgtcaaggtaatgagatcgtgtagtgactctggcgggcggggtgccggacatcgagacccttgccccactgttagcaccacagaagctctagaggttccatgtgccgctcactgaggctgccctgtacctactcacctgcttgggaagatggttctacacccccttttaagaattcttggacaatttccccttgccgtccatgagctttcatgatggcgatctattttccttccacaccatcgcgtcccgtagatttgttatcctcagaccctggtcaattgttacatcgcctcggtcaccaccgcccaaccaacatgatttgtgtactggagccaacagcaccgcatccttgactcatcagtggaggtcagcaaaatcttcgggcttcccaccgacaacacttgacgcctccgtcaaacacacaacgccgttgacaatcgacatggaggactacgatgttatcgagcacagcgacacagcattgggccctgaagtcgtggctcggatacgcgactggctccagccaaccgactacacagccgaatcgggcgaatattatcgtcacctgtcgtctcaagcacccggcacaggcctgtggctttgccaaacagacgagtataaaaaatggcacggctcaccagatcatggcagcttatggatcaagggcgttccgggagcagggaaatctgtcatggcagcgagcatcatcaggcatctagagacgacagagaactgcccggtactcttcttctttttccgaaacattgttgctgccaactattctcctcgcgctcttctccaagattggcttgcgcaacttttgcccttctctcccaagctccagctcgcactccaatcacagctgaatactgacctggcaatcatctccaacaatgacctttttgaccatttcctcagcggaatatcctgcgtcccaagactctattgtgttgctgatgccctggatgagatgaacacggacagcagaccattcctcgacaagttcaaccgcctcgccacgcaccgcccaggctccttgaagcttctcctgacaagtagacctaaacagtatctccagagcgcgttgcgagacacctcgattgtgcacattagtctgcaacgacatctggtggatgttgacattgtttcatatctcaattgtcggcttgaaaagctttccctaatgaacaatgctgtgggaaagaaccagcttgttgacttggtggctaaaaggtcggggggattgtttctttatgccaagttgaccatggaccagatggtgagtcatttctaggcgattattaccttgctacctagtttactgacgtgcaagcaggaagaagctctgtctaggcaggaccaagtcgacatttgtgctctggaagcatcactccccattggattggaggaaacatacgccaacttgttgcagaaacatcgtcaggagagccaggtcgacctcgagttccaggtttttgtcttggaaactatcacccatgcgtcccgtccattgcgactaactgagctcgccagcctcgccggatgtctgagcaccactaatgaatctttgacacactggaaacagctcattagtacctgctgtggaccacttattcaggtgttggaaaacgagactctccaagttatccaccactccttcaccgagtttctgagaggtgacggccgaaatagcccaagtggaactgagccttcttcggcctttccagtcattaactcaacaattgcccacaagaacgtggctcttcgatgcttggggtatgttcaatcgcttccactcccaagcgtaaaacaacgcaggtcataccgcgagcaatctgacgatcgccgaaatgtctgtttactctatccattcttcgattatgctatggagaactgggtgtatcacgcgagccgatatgatacgagagaccacggcttttttcacaccattttgtgctttctggcgcccgataacctggcctttcggcagtggacagggcctccgtggtattgggacaccgacaacccctctgaagggattcccactgctttacatgttgcagcacatgctgggatgtatgagttttgtctttggctcataaacgaacaaagggtttctgtttcgtcaatcgccagcgaccgtcgaacaccattgcacagggcggcagaaaaaggtcacggcaaggttgcctcactcctaatccaatacggcagcgatccgaaccccgaagatatatacggattgaagcctattcacctggcagcacgttataaccacgctgacgtggtctcgactttgcttcaagccggggttgagcctgacacaccaacaacgaacgaggatgatgaacaccccgactactatgacgctggaagagatttgcgagagaacaggccaggcgaatgtgcaatctattatgcaagtcgatatggccatctggagacactggaggcgctgattccctattgcgcgccgtctgcgttggagaagatgctctgcgaatgttgtcgtttcgatcgtactgaggctgcggctgcagtcttggcacacttgtctattccagtggatgcttcgtacagtggagcaactgcactctactttgcgtgtgggaataccaataccgacttggtccaagcccttattgatcatggtgccgattccaaggccctatcagtattggcatcactcgcaacatactacggcgggccggcggtagaggaggtctatgaagacgcggatgaaggagcggaagtcgtattccagtcctattggtatctagatgcgaagcaagcccctttgcatcgcttggtgcagagttggaactacaataatgatgcagcttgtcaggtcatccttcgaattcttttggatgccggcgctgatatggaacagctaaacgacgatggagtaactgcattacttttggcagcgtcattctcctgtcgcttttcattcagttcatcgatagtaccgtgcgtgcctgctttgagggctttactggcctcgggagcaaatgtcaaggcaacctgccctaacggaaacaaagcattgcattatgccttgggacaaagccaagaaaacctagaggccatgagagttcttttggaacatgaagaaggccaacaggaaaggcggtctctggactcactccaccgtctcggcaaggtcgggtcgtccgactcggctgacagcgaagctctatcgtgcaggttcatagagtactttgttcgaggcggtcttgatcctggttacgaattctacaaaggcaaaactatgttggaggcggcaatgtatcaaaatcccggactgttccagaccttgttctccctctgcaaggacgagtcactgaagcagcgatgttggtttgctttaccaggcgaatggcccagcagggagagttgcattcaatatctcaagatcatggttgcgcaaggcatggatccgaacatcacaccggaaggtggccggccattatacctgcacttttacaggtacgatgacttgcttcaagctcttgagctggcaggagccaaggccagcgtggtggatgccaatggaaacaatgttttgcatcttttgtgcaaacttggccgggtgaaacggtctcagctggaacactttattgcacgtggtgccaaccctcttgctaccactctggagggtgatactttgcttcatcttgtcgctacgtggtacggaggttggggagaccagcctgaccttgtgcaatggctgattagcctcggaatatccgcggatgctaccaatacctctggacagactcctcttcatgtgcatctacagcatgggaaaaatcgacaggaggatggccacctcttcatccacacagaatttttcttttttgacgcggtgggttcggtcagtctggaaattcctgataagaatggcttcactgctcttcacttggcttgtacaaagtcagaaagcgacctggccatactgctcgctgctggagcaagcttattttcgcgtactgctgatgggcaaaatgccctacaccttgcatgccgagccaggaaggccgatgtcgtgagccgtgtacttgggctgcttggggatgagagcagcaacacggatggggttttcaacatgatcaacaaacaggataacggagggaggacccccttacattatgcttgcgttagcggagaagttgaaactgtggatattcttctgagatctggagccaacgtcaatgtggaagatttgcatggtcatacgccactgcatttgtgcgctcaattcaggacagaaccagcgctctgggacttgtctggatacaaaagagatcctgatcttggtggtgtcgatgatttctatttcccagccatgaacatcattgtcaagatgcttttggatgctggtgcagacgctcaaggttgtgcttcacgcgagacagcagcccctttgcaaatggctattgacataggctgtaccgagttcattgacgcgttctatgcccagcaggacatatcggtcaagtcagggaggactctgtcaagcgatggcctcagcagggaaactgccagagttgatgtggcctccccactgttaaatcagcgtctcgacaaatatctggatggatcagtgaagcctgtgctcgaattgcttttggacaatcccaaccaatacttgcagcttcttacacccgacgatgcagcaagtctgatcaaccacggattcagcaataaccggcatgatggcagatattaccaggtgctcctggagatgatgcaatcttccgagtatctattgttggcgaggcaggtgtccgggctgattcattattacagctctcctgacaacctcaggctttatcttcaaacggtgcgatcccagtcaacgacaaattcctggatgtggacctgggtgggacgttactttggcacgcgagcccttacccctctacagatcatctgtgaagcacagcgtcctagcatggtgttgttaagatacttgctgggaacgcttcaggtggatgccaacacacggtgcatcatggttgaccggaaaaaggaaaagttcatttctggtggtacagcacttcatcgacttgctgttgtagacttccggtggaagctagatgctatccgctacctgctcgccaccggtgccgacatcaatgcgcttaacgagactggcgagtcacctcttcacgttgctgcctgcggtggagttaaggattatcatcggcacgggccagaccggttcagtgataaccggagtctcgacgctgtccgaatacttctcgatcatggagccgatcctgatctcctggacgaaaagggccttgccgcgatccataaggcatgcatgcacttcgatcaatcaacaggtcgcgacattatccaagagcttctttccaagggggcaagtgccctggttggcgtcagaagccctctgtttgaagccgtacggtaccacaacgttccagccttcgaagtactgctggagcatggacttgatgtcaatacggtctatgatgaaggaccgatcatattcccccaaaatggcaaaccgattgatgagacaaagcctcgacgacgttgtctgctttggttcatggccatcgtttcctgttggcctcttgctaggtcacctgcaaccttgtcaatggtgcgcattatggtcgaacatggggcggatctgtacctccctttaaacgacgaagagacggtgtgtcattatctcttcgagttcgcaaaacgggagatcgtggagacattgttgcaggaaccctgtgtctcacggattgacttcaatcgtcccggtcagtctggtcaaacgatcttgatggcggcatgcagacgagctatcgaatggaggcctcatgatttgaaggatggatcaaagccggcttggctaccgttgcaaaccctgagattgaacttggggatcaaacctgatgctaccgctgtcgacaatgctggccagacgtctcttcatcatcttctacaaaataaagcgagcacggaggatgagattcttcattttatgagggacgagcgtgttgcttctactctcttgaccaaggataacgatgggttttcgcctcttcattatgccctcaagctgctccggccgagagtgtgcgagtttctttgcgacaaaggagccgacattctcgaaccggacccgagtggttcttttactcttcaccacattgcggcacagtgtgttcagacggctcggtcatttgccgatccaacggatggagcacgggactggaacccaatcccccattcaacaacctattttgatgattgtctggcgctctgggaaaggtgtctgaaggaaggagcgtcaattaacgcacccgaccgagatggaaacacaccgttgcacgtttttttagtgtctccagacgcatggacaccgtgtaaatacccaggggatgagcatgagtatgatcctgtggcgtgccatttgaagcggtacaagcagcttttcccgccagagagtggtgttgatatatgggcttccaatcgggagggggagacggtcttgcataggattgctggtcactgtgtgggaagacgagcggatatactcctggcgaggcattctgggagaccgtcggatgtgaagcacataccgcatgataaacagctttttgaagcgtttttgaagatgggggcggatccattgaaggaggatgtgaaggggaggagtgcgctggatgtggcgattgcttgggggaagaagtatattttggacttggttgctttggatggcgggtcttaagggttcgtgaatgggatggtatcgaggaagctggggctaacctgagcagatggatggggttatataaatgattacatcttatatttacatgggcatggtccgttgctttcacagggctcttttgtcatacaatctcgccgccttcaacccgtccttcaaagcagccgtctgattgtttaaagcgtgcatgttttgtggacgaagacgggtgtttaaaacggatgtggcagaaggtattaaaaaagaattctattaatccgagcttttgctatctcttttcaccaacaatcttagcatttgttgtattctttatgcttagattaagatgctagaaggctcagaatagagtattatccaaacttatgctgtctatctttagctaggactgacaggttgaatggttcagaacaaaggttagaaggctcggcatagaatgacaagtaactagctatatattagccctctttctcctcatgatggatgcagcgcacatgcgattcaggggtaaggtaacagctacaaaggagatccttatgtaccccacctctaaagagcctctgcaccaatcaaaaccccttgtggtgtagttggctatcacgttcggctgtaaaggaatttattgataccgaaaggtcaccggctcgattccggtcgaggggactatcttttgcagcttttcctcatctccattctctcgtcaagataccatggtgtttgattctgagttgtttttttaccctccggctttttgcaacttataggtcgtcaatgcttgcttatattcatggggcagcatcgaccttttgtctacatctgatagaaaggcaacaattacaaaaccggtgactttgacaatcttccagccacatcccaaaatcgagatatgtcaaatctctgatggcaacctgtccgagggagggggtcactgacatcgttgtgggtagctgtccaacgaatcagatgtcttgatccaggatgttcgttttttcacctattgtggcaagccactcatagtcgctcacaaccacacctttacgcgacacatcggagaaacggtgcggagaactgtggcttgacgtcacgggtcgtacgagggaatctggatttctgtcaatgcatgggcgtcatcccaacactcgctcgtctcttgcttgagtatttcaacgtctgtctcagccacatttcattctttggatactttatcagacttaatatcgacaaggaaattgacaatcatccatcaaggcacaatgccgagcactacccaagccaaggttaagcaacagccggttgcggtggcgtgtaagtggcccctgaactggatccacattgcctgaaaggggaaacttatccgttcatctcacatcagcatcgacgtcgaagaaggcaccggctgcgtctgtctccaaggctgtcaagaagacaacgacatcgtcgtctttaaagcctaccacagcatcatccaccaagcctaccgcaacatcgtcaaccaagcctaccagaacagcaagcagcaagcctaaagatgtgacctcttatgccaccagcaaaactccagcccaggcgaggtccgcggctaagaagctggcaccggctgtcgcatccacgccggcgacacagtcctccccaaagcctaatttcagaccagtcaccatgacagctcatacgaagaaggctcttggggtgtccagcccgtccagcgtcaataagtcggtgcccatcggacaggtcaagaccaccgccgctgttcgatctgctgtccctgcccggcctgctcccactgctgcgcgagtcccagccgcctccccagtcatgccaaagactgcgacttcccagcccaagacaaagcctgctgtttctgctgctccagtcaaggcctctcctcaacctcctgccgttactcaaacccagagtcccacgccccgaaagaagaagtacgcccctgaagctcacatcccaacctcaaacttcaccaaacagctctccaacaccgttggaggtgtggctcagggtgtagggagaaccgtcggcggcgtgggtcaaggcgtggggagaactgtcgggggagtcacgcaaggagttgggcagacagcgtccggcctgaccactgatgcacttgacaccctgaaccgcactaccaactcgctcggtcggggtgatctctatggcactgtcgggggagttgcaggcggtgtcgggaatactgtcgggaacactaccaagaaccttggtggtgctgtcggaggagttacgagagggttgggggatactgtcaatcagactacggacgggctagggaatgcgatcgggggacctgttggtgggttgacgaaaggggttgggggtgctgttgggggggttacgaggggggtgggggatacggttgggggtgttacgaggggattgggcaatacagttgggaatactactggtgctttggggagaggagacttgggaggtgtggttgggggtttggttggtgggttgggggagacagttggggaggttggaaagggggtgggagggattttgagtccagtattggggggtgttctggggggtgggaagtaggtctgtaggagagtggtggttgtttctgggggtagtgatggggttgagatacacgagttgcctgaatgtggtcatccgcatcgagataacaaacgtcctgcgctattgaagttatgaagctacctagcgaacgatgatgcctgtgtgttgtacacttgtccagcaagttgatgttaacgattagccaaaaagacctataacgaaacggttctcgtcattcttcatactcgctcaacaaaacagaatcgaacatctttcttttgttttgttagtttgttgtttgtcgttggttttcgcttctgtaacctttgtgtctggataatggggaaagagaagaaagcaaaaggcagaccttggtcaacaaagtcaaacatcaagtaaggaaagcagaaatctgataggtgccaccagaaacatatacccaaaacaaaacccaaaagaaaggcagatccagtcatggtaagccagcttgaccacggtgaagcttgagagatggaactgttaagccaatggtagtagccatggactcccttccgcctcgatgttatttggaccccaaagttcacctcagtccatcactgagcatatccacgggtccaatactgatactgctgggagcctgcagcgctttggtcatagtccacaggcccataatttggcgcctgctgcaagtcgatgttattcccaccggcaggttgcgacagattgcacgggtagaagttcccatcagcgatgtagtaccggttcccaccagagtcatagacggtcccatcaggggcggggtaccaggtcgttccattagcgtcagtataggggctgagcttggtttgcttctcggtcgatgcaggctgtgcgtggcccttgtggcgatattggagaggtcggtgtgacggaggtaccgaccagccccagcctcgagagtgatcgcggacatcggtggacacaggtgttgtgccgtacttcgaatccgcggtcttttttccatgtgatcgagagccagaggaggaaccccccgctggctgagtgtcggctctggctttgcccttgcccctgtcagaagaaaggtcttcactgtaataccactccggctgggaggggacagttctgtggcgatctccatcttcgtataaggatctgtacgggctacactcgtcgtagaggtcttctgcgcgggtcacgccgtagccaccatcatcatcataacgagacatggtgaggggaaggtctttggatgcttcgggagacgtattgccaatttgcgagtttgcaggatgctgttgtgctgcacgagattctgcaccggtgtcaatgacaatctggttggaatggttgtgggaaggctcttcaaagaggactggaggtctttaagtacttggaacgctccatgatcacggcggccgagaaagtgaccattgaggagctcagtgtccatcatgtcgttcaacgacatgttcagcagagtacaaaatacccaaacggctcaggtctgagcccactattcccggcttactgggaaagagctactcagagggggtgtgagccaggaatagaaggctcaacagaagagaggctccacttactagccacttaggggaaaatacccttttatatttcactcaggcaggtacgaaaggctcacttttcgagccgctcatctttttaagcccgtaattaattcctcagactaggtacttgagccagtggaagaagaagggcttaccagtaccggcagtcaccgaaatggtttgcgtagccaagtttcgtctgttgtcacgtaccccaagatcgtgtcgagtctgcttcattttcgtgcagctgggcgattctgccacaaagtccaaagattgtgataccacgtcttgcttcacggcacaagcgatagtgggggacgcagggtgtgtaactctctctggtaggggtgagattatctacccacctggcttaacgagcatcttccaggagacacgcttgtcgtgcaatcactctgtccccgtttggaggtgacctcgtcgtaaacaccggcatctcaatctggactctcgcatcatgcgcgtcaaattctcgatcatggtgtcgccgatcaagtccacgttggaaacctgggttcagtccatgtcagcctcttgacccccagctccatcaaacatctttcatctttatttcaacgatacaccccacaccgctgatgccgaccggagaaccgcagaagccgcaataacgctatcgatcgtttgagaaggacgctgaagtctggatggtgtagttatccttgccaacgaaaatgacctcctcacgaccaaggcctgcctgctgatggagtgtaatctgtcgtagggcagatgatattttaacagtggcaagaggcacttccatttagctctctggagatatatctatatggcaccgtatcacaccaccggtcaatttccactggcgaactaaactatcattggcccaagacttattcctttatttttcgccttttcattgcagcatagccaccaggcaaggcctctcagtcagtctcgcattcccctctcagcgaccaaagtcccccacatgtctcgtcaaccgttctttcggtgaagatggcaaagaaaaagaaagcacaacacccacctcgccaaggtcaggagtacgcccacgccgaagctggcccttcttacaaaccccgatcgtcccacatgtcaagcaaccccaacccatcgtcttcgaagccgaacaagggaaaggaacggcagcccgaacccacaccagggggcataatcgatatgggctcttggagcaaccccagagatggtcagccgatgatggcaggtgggcaaggtccacctggccagtttccactccaatcacaaaagaatatgcaccaacacttcccaagctggccggagcctcttgaaaacaaacagcccgagggcttctacctccaagaaacatttaagaaaccccattttgcccaacaatatgaagcctggtacggcaaacacatgatctctccagagatatacggcgcccagatctttgtgggccctcctgttttgaaccctgatgagcaagagcctcaatacgacgtagatccacaccgcgatctttatcagttaccttcgtacgactcttctgcaattgatcagaacaacccccatgacacacagtggtagttattgcgaggcaggaggttatgggttatttgtgccggttagtgtagggattggggctctggtagctacattatgcaatacagccacatgcttttatttgagaaatgtgttccatggtgaagggataatgtgccgtgatattgatgacatgatgctaccagatgagcatgttgatgaatacgtatacataatttactactatttcaatcatctgagccttttatttcttaatccgacccttttctgtcctacatccgagactttcttcatcttaaccaaagccttttatcttcttgaccacacatttcttgcttttaatctgtgcttctaaccgttgttttttgacagacatccacgctttttatcctaatagtccgaacgtcctctctatctattccaagtattttattctccaaatggaaaccttttattaccacctttcttctgaaacataaaaactacaagacttttattccaataattctcacgtctttttacattcaaccctagcttttctttaatcggtaaagtagagaatgaaatctaaacccacactccaatattcaaagtctaaaatcttgattatatacacctagctagctgcagcgaagagttggcatggttgccatgggtgtgcacaaggtaaaagacccaccaaagcactgagcttggtgtccaagcgtaataaaatgccatggctttgatccctcttgcatttcatatagcgtaccattcatcaaggaatgagtagtcagaacaagtgaaaggaatacgctacaaagctgtacaagtagtaaaagactgttgaacaagtcgtgacctatgtaactgaacctctgctactactagaaagtcaaagacatgccactagcagctgagccctcttctaatgtgttagctgttttagctccatcctctgtcttttctttccgccggcgattcgtaaaccactccttcgactaacaaccaataaggaaggccgtgtatgcaattacaatcaaacacgtcaaagtaaccaagagaaaagacaagaaaactgcaacaaaaaaaacccaaatgctacctccgattgccgtgtagttccagatgacatgcagtgtgtgtatccagcctcgatccctttgccgggtggttattccctgccacttggtgacaaaagttctctataaattaacgagagtctggataggaccgccgcatactgtagacggtgttttgatcggtatgtccaaactgagctttctgaggcggatccgtcgcttattcgccctcgtatgttgtggcaaagggttcttcagggtaagcagacacagggtaaggtccttggttgtagccagaggtgttcatggccaccgcctgggcgtcgtactcgggttgagcttcatacccggctcgggcttcatacgcaccttgaccataggataatgcagcaggtgtggttgtgtagtgtaatccaggagtgggcaccggggtccgtaacaatgctgatcccgacggtagagtgcgccaggggagagcccagtcggtcatatctgaggttgtgttcgcgcgatatttgtctttcttatatccaatatgttccctctttggcggtatcctctgtcctgtagagtccacgtcccaagtttggtcatccgccgtgttgaatttgtaatatgtggcatattgttccgcagttgggtggacggggcattcagttcttcctcctgtcatcatcggcgctcccattgtggaagtctcccaggtttgcttgggtgcctcctggactggctgtactgatgaggtgtccccaatcctctcgggcgcctgcaaggccggctgtggctttgataatgaggtgccatagctttgcggggacatctgctggactcgctgtgttgatctgacaggcgtagcatagtgtctctgtcgcctggagctgtttcccgaggtgagataagaatactcgttgtaaccttcggtgctgaaagagcctgatccgtagctgaggggaaaatggttatagtcgtcgtcataactgttacttagttccgcgcgcgtgaagtcttcgtcatcgtagcgactcgaactcccttgaccgagatatccagacatgctgactacaaagtggagagcagataaatggaggatgttgggctgtgcgatgtggccaggggtgtgatggtggtagggcgtgagtaaggtagttgggtggtaagagttccatgacgaatgttgggctcttcctgcaatttataggtatccaggaaggaacaggacgcttctcacatgccacatctgggccacgcctcgagacacttcgctggtccactaaactgccgcagaggtgcttttcatgaccgtagctgaagtatcttgacacaggttccagaacgtcgtcgaaccactcttcaagtgatacagcttgacgaaggcggggctcggggctggtggatagagacgatgagctcagagatccattgaaacagaatcatgatgagttgaagggcggtttggttatatatctgatattgtgacgcacaaagtaacgccctattgttttaggtatggacagacctgaaacattttcatgatcatgggaagcctactatcggaggactggacgtcgagaatagcggcaaggcgatcgtgttgccacccagttgcccaacgcagccagctgcatcccttggtcaccagtccacaaaatatccgatgccgtccccaatcgtactcgaggccacccctgcgtgatcctggcctacgtactccttgagggtcacatccctcacccttcggctggcctggatgcggtaaaacaactcctgcgtcacctctgtctgcttgaacgactgccagagggtcttcctctcctggaatgcttcctccgtctcagtgcgccgccgtggggggaactgttcggccgacccataggtgataaacacagctggcttcttttctatggcctcggtttcgttcgcgcatggcaacagcaccggttgttggacacatcctgttccccagcgccgtgtgacttcgtcgagcaacaatccattgttccagatcatcgtcggcgtcgcggcaatgtacgtgtcgaacaagcccgggtaggcaatcagcgcatacacgacaaatatgccaccaaaggaatgaccgtagagagcgtcgcgtgtaaatgtgacagatgggaagatggtgtgctgcacccacgggcggagggtcccgttgatgaaggcgatgaaatcgtcagcacccgacaacggcggatcgctcgcggggtcatcaggtagtggcggacgcaggtcgacaaaacgccgggtgagatcgtagacgtggttgctgagcgggtaaccaatggtcacgacgatactgtctggctgggctgaatcgactcctttgcgccgcttgaagttctcaactgcggtgaggccatgggcattcccgtcggtgacgtacatggtgagagcagtcttgttggtgacatcccgcgactgccattcgaaaggccaggacacgccaatctgataggttaggttcttggattcgttggtggcattccaaacagcatagttgggaaggaaggtggcagggaatggcgggaatgccgtgaaggaccagccgctcagagaaaccatttttctagcaagtactgcaagacttagagatctgagcatcctgattgcgttttaagcagcgggccacgggaccttttgacccaacagtgtttgtgcctgccggggcattgcggtcccttcaccaatcatgccctcgaggttctgacgaatggaagtgctggttgtttgaaggattaatgactttcagctgaggttgtgcatatcaatatgccacttatgcacgtgcactgcattgtgttctgcataatcacatggagttctgaccaggatataatgacgcctataacagcgcattgctcccatgttgatcacagtcttttgcagactacctatataagggaataaacacattcgtatattgccctgtgtggcttggcaacccgcaagccaccagctcagcatagctcaggtaggtatctattctgcctgcagaccgttacacaagcctgatcagagattgggcctgtacgatgcgacctgcagctcaccgatttaccaaacccgtcccactagtaaccatttaacccttcgtgagaccaatttgcaaccgctcacatcctttatctgcaaaccttgatgtttttgggtacctgatcggagtcatcttgaacttcaccacacctgcggacgattttgccggtgatgagttctcaaacaacctcttcagtgatctcgcacccctgctcaccctttttggcgagcaggtcacaaaacagttcctcagcctgagtctggggtgggctgataatttccttcttgccatgggtcctctgggaatcaggactatcatcgtcagtgccatccgtgtcggtggggttaaaaagctcaaggcagttgttggcaggtgtgttcgcgttgaatgttcagattcactttttatactgactttcataagggcccgtgagagccggtcaacggccgagctggaactgctctcatctacttcggcagacgtttgcgagctgtggagtggccaggagattgtccgcctcattgggaaccctcagatgaaatggctcattctcgacaagtccaatggcaaacttcacgacttacagtccgcctccgaggaaagattaattagacacgatcaaattctcggttattccgatggttctgaagtaacgtccattctgaaagacgcggcaccgaacttggctctcaacgtccgtcacgccacagcttccagcaaagagttgcggttttgggcaatcgtcggaataggtttacaagcgacagctatcgtcatccccggtcttgcaacatatcgctgggcctggctaaaggcttgggcgcctgttgcggggtatggctatccttgctttcttgtcggcacactgctagtgattgtaggtattttgggatgcgggcatgtcatagaaggtattaccacggaatacagcttcgagcctgcccacaactcagatcttcagccattggtactgcaaagatctgtcacagtggctgaccaacacttttcttcatatgctattttctttccgtctaggattcggacatctactctggcaagtgatccgaaggagagctacttcaggtatgttggaactggcacttgttgattccttcttcaaggtaataactgactatgaccccggcatagtgtacttgcagctgcctcaactttaacagcactagttgggtttgtcattcagtttgtcggccttcgcgcacttcactggtcggccactatccttcagcttggaataactttagtcatgacaggagtgcgtgcttgggctcgacgaggccttgcttttgatccaaccgccacaacgatattggacggccacgaaaaggcttggcttgctcttcatctttgggcaaaaaagaccacgggcgctacccaaagctccacgacagcatcgtatgtacggacgttctttggaattgaattcagactgactgaagtacagaggcgaagaagtggatatcactccggcggttcaagagcaaggtccagttaaagatggatgggatgaggttagcaaggtgaccaaactattccacaacgagtaccgctctttcatatcacccagtgcccggccagacctcccagaaggcgaacagacattgcctcagtatgttcctcatttgttttatcaaaattggagcgtttcaaaaagcaattcaagatgaagccttttgggagccttacacagggctcaacggaacctttctcgagctggtcagggtaatgatgtatcagtatagtgatcggggagtccctcgacttcagccaggtttccgatccagtaccccgtctatcctgcctcaacaactttatacggcccaacatctttttggcccagtgcaccacaaaggccttccccgcgtctgggttcacgaaagaaattactttgagaatgagccgaccggaaatgaggcaatgagcggatatgcaacgatttcgaacctgatgccgaccgctgacgatattgtccctcgggctaccactttcactaacttggcggagcgtattctggggtaccttgcaacctccaaccacgtgcgatggaaggggttcggtacctctttcacctggagttttactgtatgtgtcggtaaactatcgctttaccggcaagccagcaacacctcgcgggttgttagtttcagactagaggccgaggtcgacaacacgctcggttatgcaactacggctcatacagacaaatggagttttcaacagcccaatcttgttcagggtttcattgcgatatggcttttcacgttggctcgcagaagagcggcgatacgagatgtcatctctaacccgtggatcaaagaactaatgttccgtcatgaatacattgggcctcttcgcgaggccatagggccggagtcagagcttcggtacttgagaatcattggtacacccggtgcacagacagatgctgtggaaagatggataggcgttaccaccactgggattaaaacccccaacggcggaacaataacccagcatggttcttgttcacccatattcgggctatatctatcttcggtctcgtatgcttaccaatccctccaccgcgttggcctagctatagtgactgaccttattcttacagaagctgcagaacagagggacctcagccccaggctggtgaagatgataaaatacaccgtggttggactcccgatgagattggacgacacctagaacctgaagacgatgatatcgtctttgaacatcgcgccggtattgatgtctccatgcgatgcgtgcaagaattagtttcactattcgtactggccattgcttcaaatattacggtggtcggcgggacgacaaggttcgatcaagaagccgcggatatggagttggaattgcgacggccgcagcgatcttggacaaacattgtgttcaccactattgccaacgaaattgtcgatgccggaattgcacgcgatctcacggaagcttttgttcttgtcattccggcttttgcttaccataacctgctaccgcgggaggaaggggttgatgtcagctttgactcggatactggcattgatggaggtactggttacccaggacatcccaacgcgggcacctcgtcatctgtggttgcgcttgcttgagaaccgggaagctagaggtgttttagttcctgtttggttctaccgcgcgtcaatgattgaagattacggtgtaaactttctgacgacatcaatgtcggtgtctcttcatagggacgagacacaattcttttagatggagatcccatgtcagaagtaccttacccttgacttgtgaccgacgaactccgagccttgatattgtggtgtcacatatgcctacttcatgcagcagaaatgagaagacggtgagtcaatgacaataattatctcccgatgtggccaatccagtccattctaatgctgcacacgaagcgggcttatgcaggttggacgccgcgatattggccaactgcggctctgagaggggcaagaccaggcagaacgagctcaggttactccattgcgtgaattctgaccgcacataagttggtagctaccccccacttttgacttgtaaaagcacctgattccacctgggttcggtcattcagaaacacaagcccggcaaaccatcacgatggccaggtgtgcaccttctcgtggccaatcgaaggctgacgactcgaacagagtccaagtcttccattacgagcccgatacttctgattcctattcggattcctccgactacgttgaacaaaatgctcgttccccctcctttctgtctcgcgtgttcaaaccgaagaagaagtggcaagatgccgcagttcaggtttacaagcgtcaccagggcgacaacctctacatccacaaagtccgtctgcaaagcccacagcttaagaaagccttgaaaggccttcttgagcgatatgggttggtataccgtgatgacagtgtcatggttgaatccctcgccccgcatcgcgccctcttctttgtgcgccatcacgttgccgagattgcaaagatgtccaaagacgacgagacccgcgcccattgctctttgcttagcggcatcatccaggaaatcttcaaggacaaattcgaagagattgagactctcaacaaggaggagaagatcactttcgaactcttgtggactctctacccagaagggagcatcttcggcacccagcttgccgatgaagtcccccgtgcctacaaggtcaacaagatcactcttaccaaggagaaggtagagatcaaatgcgagacaatcatgttcagcggttactctttccgacgatacttttggaacgtcggtatcgagaggttcgatggcgagattgaccgacttcagataccaatcataccgtatatcgacctggaatgcaatagggggttgcgtgataggctgattcagcgtggaaggaaggcattggacttccaggtcccaaggtacatggagtatgacccggaggcttgccgtcacgatgtggtggctagcccgtgggtttggaaaggatcagaccacaaactggtacgtcaattgttatgctggcacaactcttctcttttactaattgtgcttttacaatgcaggagaaagaaaaggttgttgttgactttttcctggtgcggaagcgtgtcccctaccgcttcgcccatgaacttcttcctgggtacaataccgggactcgcatgggagccaaaaacttccgcagagcaacacctgaagagatggaccacagcagacgcgtggtgatgaagtctgctgacaacctcctgattatgtctccttatgtttcaggcttttctctttccaagagaacctatggtacgttgaaccagctcctaatcattcaccgccatgacgtttctaacatccctagccgacttcgagctcgatgcgctcaagccgattgaatgcgaccggaatgcgatggagaaggttattttcgacgataccaagaaggccattctcaaaaccctggttgagaaccagaggctgacggcccagaatcaggatggtcgtaagccacaatcacctcataagtccttgatttgcggctaacacgaggggcaaaatgaaggcaaccgggccctcgtaatctcgatttccggaccaagcggtacaggcaagactctgctggctgaatctggtatgtatccctagaactgagttctcctcaatcgacctaaccagacctccggggctagtggcggcgtttactgggcagccactcttgaaggactgggacattttgagagatacatttgaggaggcaagagattgggatggctgtatcttagttgagaagccatcattgggccctttgccagctcagcttgatgcaaatggtaagcagccttcgtctctcatcgcattacccaactcgcttctcatggaaaatcgaaaaactgatggatttgaccggaacttcaagccttcgtcaaagagctcgaaaattttaatggtaagtttacccagcaccccaagcttggaagctcgtcagatctaacatgacgatttcaattttgtaggtattgtcattgtaacatcgccagacaggccatttgtgtcccccgccatagcctcccgtgcgcagcttcatatcaaccttcgctatcccagtttcttcgagcgaaagcgtctctgggaactcttcaatgaccagctccctaacgacgttgggaaactgacctcaagtgaacttgagctgttggcagctcatccaacgaacggtcatgccatcaagaacctccttgatgtctccgcggcatggtacaggtcgctacatcgacccatcagccttgatatgattgtcaagctcagggaacatactgttactcctggtggcggtgggccgcttccaccgccgccacttccccccggcatagcctggccatctagaggcccggctgtgccttcaggaatggggggaagagttcgtggtcccccgcttggaccaatcgggactgtcgtttacacatccccgtccagcgagtcaaagaagaaggttcgcaaatgcatacatgtctctgatgatgacaatgacagctagtcggaacagagcatcagcactctcagctccgatgatgacgacaagggtctagaatctgactcggatacttcgcgcgattgagctgggaaataccagcgcaggttttgggattttcttgtcacgaatgaatgaacggtcggcttggtttctgctgcgctacacgagggtaggtaactttactcgaaccattttcgcagctttcatattcatgtttctatttatgatgtaacgaaacactctcagtaagctaggtcaattcaaggagtatgtgagattggctgttctatcgcagtgaagtaaatcatcttggtggattaagaagtggtctgacgatgttctgaaacctgtgtcaagatagagtaccttagttttaaagctgagattgaaggtaagaaggggttggatcaagttgatgaaaaacttagggtaaaataccaggaagcttggataagggacacaaaaagcttagattaataaaagaaaaggttgaacgattgaaagagtaataattttcatataatataagtaaaatattaaggggttgtgataggtgcggtcaccgtggcagtccagaacaatgggtgcaatgatgataaattctggtggaagatctagtgcaaaaagagagctatatgtatgcctgcttgccagtgccgtgccagtaccctgcctccaagtgtcctaacaggttgctttatacgttatgatattgaatccgactcccgcctttgtcaaagtatatcacttactttcgccccttctgcccctgaattgcatttgcgaagcgtgctcaatctactataataagtgtcatttacctgcgtgaacgtcaatcacatgacagggagcttggctcagttggaagagcgcaggtctcatacaaatgtatgatctggatgtctaacaccagagttatcctgaggtcgtgagttcgagcctcacagttcccacttacttttactgccacttgccacagcaaaggtgttttgttttgcctgctacaccccaaaaggttaagagtaatttttatttctttgctgtgcatggtctacactttggaaactctctatgtgacccgacataatccgcaagcaagcaaggagtcacagaacacctaaggagcaaaggcaactggaaaaatacacttcatttgcataacgaaagtcagaatctaaaacagtgcaacgtcacctcctaaaagagcgacaatgaagaaagaaacaagctcaatcctccaccccatcccggaaaccttcccttatccaaccctaaccttccatacccctatttcctcccccctttcccttctctccatttccaaatctactccaccccatctacctcttaacacgatagctcctaatcttcctcgccggagtcaaccggtggtctccattcccattgcgatagctcaacccatcgcagttcttgttgacaaacagctcaaaggtgttgggatcagggagcaacgaagtgtccttgttgaaccttgccctgttgacgttcaggacaggggtaaaagcaatattcttgcagcccgagttgggatcacggccagaggcggtcatcttgcggccgtcggaagcaaagagctcgagtttccaggcagaagccagggaaaggggggcgaggatgagggtggagagcttcattgtggtggatgtttggtatggaaagtgattgttcttgtctttggtgatagagaagtgtagtagtgtgattatgatgtggctgctgagggtgagggggaggaaagaaaagactcagatactcgaggccaacctgatcctttatagaacctcattcctcctcactttcaacctgctctcaacttcatcactcccctcccctcggcttcttctccccgttcttactccccttcctgtaattgcctcccatactaaatcaccctagcggccaatccaccatctcctcggtcaacggtggaattccgatgccgtaattcctcttccaaaaacacaccaccaagcagaacccgacattccagtcccctctcctatcacccagagccttgtctctagctcaccccttgcataaggctgcgccagccgaccccattaatagaagtaagatctggggtcctcgccccatttccccggaccaacgcctgccgatccaagatcttgtcttaccagaacctttgacatcgtggctcagcaacccacaccccaataatgcacaagcaaacatgtcatcgcggctagattaaaccaccatattccccagcccttacaccctcggcgtttcaaacaaaacaaactccaaccaaaacaaggaccatcctcctatgcaacacccccaacaccagcttggtaccgacgagacaataataaaaggccacagaaggcctaactttacgagtaagcgtaaactcattggcccccaagccccagcattccaaccctgcgctaaatgcgaaccgacacaccaccataatcatcggcctggtatttgtccgccaagcctcctctctcaaaacaaccaaacccttcccgtagatcctatgcacatgaaaagattgcaacggaggaaaaaaccaacttcataagcaaattatctctgaccatactcaaaaagacacagccattctttcatcaaccatggcaccatcacgtctctagaactgcattgacacctagctgaagaaaaccaatccaccctttcccctttcaaacaacaaagttacacaaaacatcaaaatcatggtcgagaaaccctggcgatatactgacccgaaaataaaatcagattcaaggaaaccataacctactagctttggcaccaccctgaccccaaagcagatagcacattgacccaccattcccattccaatcatccctctctaaaggcaagaccaagtaatccaaccccccaaagacccaaccctcactctccggcatgtctcgaaaaaaagaaaagggaaagccgcaggtaactaggaaacgaaaatagtcgggtaatggcttccgcctgtctaggcgacaccgccagcaaagctcaccaatctccggcttcccaacaccctgttcgctgcagagggccttcttggtgattcgtccttacttggccagttgattcggtgccgtaccagtttgtccagtcttagctggagtaccagcatgcttaacgacagctggaacttcggggacagccagggaaccactgagggctttctcaagcatgctcaccatggaacccgtcactcttgagctgctcttcctactccactccctcacctttgccagtattgctggtttctggagctgcaagtgcttcaaggcaatgtaaccccagatttggcaatcggccgggctggcagtattagagtattgggatgtagaaggggaattgcccagagcctggagccaaggcatgatggcatgatagaccgtattgcattctatgttgcgatcgtacgcttcgctgccggcgtggttgggtacgatttcgtaaccaggttcgttatagtatggccgctcgacaaagatcatggctggtagaatgagcggttagttggagcttggtcgtctaggttgagcggaattacatacactgtatagaaaccaaaacctgtaggattgtcgaaacgtttggcacccatccctgtccattccatgtcccgatcagtgacaggcaaactaaccgatcatagaaaacgttagcagcttactggctgtaaagcgcgtggctaaaacataccttttccgtttgcatacaagtttgggttgaatctgaccttgccaccgcctgtcgtcagaaactgcacctttggtggcgccgtgggaaagtccgagccacaaagaatgtcaaagaggaagatgccatgctcataaggcgtgttcttaggcccgatgattaacactttgagcatgtctggtcgtgactcgccgtagcggacatagatgccgtcgggaaggtccgcgtgtagcgatgagatctgcgcaaacagctttctcatccgctggccattggagttcacgacttggttttgaaaacccgtgtaaaagttggccaacaaaagatcatccttgattcccatcacaccatgtaacttgtggtagtcggtcatcttagccgctgctgccatcgattcgagttccttgtttttggaccgtgtgacgacagtgctcgttgtagaagctgacgcacggggacccgagcgagccttgtcgtcttccggtgcgggtttcagatgatgaagaacgtcttgcaggtcgcagacttgtcgcgcaatgcagattgcttcgtcaccgccatccgcagacccaaagctcttggaaccatccatgaagactcggcaaactacagatagtttctccactaccgtataaacagattgtgcagtttcgggtttaatttggttgcttgatatagcctgcctggaaggaggcattgaagccattgaagccattagtaactgttgcgagggtgggaagtggatctgctggtggaatatgcacgaggcggcgtcccagtttcgcgccaacctgtgaacaaagagaagggctgccttgataatgccagccctcgcatccatctcgccaatagcagctgatcgcaaaatctcgcaagcgagtctcatcatgggagatgcatggatcatgacccgtaggccaggtgtggactcaaactctttcttatccacggatggaagcacttctgcaagtgtcaagaaatatgaaactgcatctgcggactcgggcgttggcttggaattgtggaactgctgaggctgccctttgaaaggattgaaactgtacgagtcgtgtccatagccagtgccccttgcaaaagctgtctgctgttgagggggctgttgagggggctgtagcttttgctgttgctttggctgttctttcgatgtaggcgtagaaatcttcgtggctgtaggtccctcgtaaccgcatagtaaagagaaaatcacaaaggcgcgcccctcggggcaacaccaggacgctcttatggcatcagttactcggaccgcgttggccctctgtcgggccaacgatgtacctcgagtaccacaggccgaacaaccttcacagccacagtatctgcattttgtaaaagggtggatcatccctactagagtcgtcagtgtaccgcatttgaagcgtcaaagtcttgagtgacgaaacgacttgcctgctttgagcatggactttgtcttctgaacaaggacatctgctgtcatgtcattgctcttgccacattggcagcacttccacctgtggtatttctccctgaactcggccagatggctctgtgtctcttcctctgtcacaggcgagaagatctgggggctcgactctggctggtttttgtattcgtgttccgcctcttgaagaatgcgggctatggcctcgtcgttcaagacttgacgctggtcgtcatcgtcgtatatcaggctgctagagctgctgtctgactggctcgaggaattgctgcgtaaaaaccgcgatggaggtgcgtccaggtcgatcggattgcccctccttgatcctggtgggtcggccgacatgatgaaagctgttaacccggtcagtaaccagaatggtcgaagatatcttgaatcccggatccgttccaaacgcccccttagcacaaaccacaatgtttgcgataacgtaacaatcaagacattcatgataatgccactgatattgcaggggggtgcattacaaagtggtcctgatgggatattcatggcggagagagcaggtttgacttacgcatggttgggtaggcgagagtattgctgaccccgctgggagacgtgctaggaagctcgtttgctttcgaagagcccgctggtgacgtcgacggcgctgacagagaggggggatactgtacggctttcttggtgggtcctagcattgtccggagctgcttcgggggttggcttgatgcatcatcttctgcgatgcgtctttttgatggccggaagatgctctgaaccttctgcatcctcatgcccagtctctccttaaaaggcggcatggcagatggttgagagctgcccgcgtgtggaaacgcagtgtcgagagtgtggggatctgggctacctaggtatccagtacccaacatagggtgaagtcaaatgtcaggcgttgaagtgggatccggcggtgctttggggagaacgcaagcgaagtctaaaaaagaagttcgacggcgctctagactgatgatttcgtttctgccagtgtgaccttgttctcttttgttgcctgcttaagtgactgtgacgatatccagtaagcagcaagctcaaatccacccagacaggcggacggtgaatttgatggcttgcgagttgctccgtaaagaagctagccaagggaatgtgaaacccgtgttgacggattgtggggcatccaaatcttgagggcttggggtgagtatattgaggcgtttcaggcgtttgtcgggtgtcaatgaatgaaggtgagctagctgctatcacaatagcttgtttttattccctctggagagcagatgttaatcacttgttgcgacgctgccgccggggaaagtcgacaatagcccccaaatccagaggaagcaaacaccaaagttgcaaatagtgagctcagatgacggcgacgtcgaggtcctgggtgcagcatctgacctgcccgctttgcagcccgcagtttgcccgaagagccgttggcttcctatgggtaggcaacctgtgtgactgcacctatcaaagctcccagctgtggctgtcggagcccgggccaaccgacaggcagcacctgcccgtgacttgacttccgttccacctcattgaccaaccgattaatgaaggtgccttgttggcctgagcgggtcaggacagcaagccaacggcggcattgtatgaaagagcagccatccaacatggaaggaacaatgctaacactcgtacggcacgatggcctcatgcactcggctcttagctccttccacaaaatgcagcggtggcattcttctcccgtctttgccgagaggatgagtacatccccccaaagaacctggaacacaccatcacgagtatcatgcttttgtttgtacaaagcagcactacctcaacagacccgtacacagcgcacacattttctttcggccctgccatgaagcggtggctcgcagccctcgcaccatcggctctcgcagcagcccaagatatcacaaccccctccatacgaattgaaactcgagttcccttaaactcaaggctctgcaatgtatacgtcgaacacgtgcaacctgtcaaaggtgctgtcgacttcagctatggctcctgccagcagctaaccccacacgactcccaccactttatcgcgaccagcacagatgcctctcaggaccgactcgtttggacgctacccgaggacatcttttctggcggatgcatttcggcatggagcaccaccacaaatgtcttgctgggcagaagcgaggtgcaacacctggatctccacacgatggcccgaagacgacatgcccgccttgcccgccgcagcaatgaccccaacagcattttgatggacaattctacaggtgtcaatgtttggggaccatggtttgatggtgtcgaggtgctcaagaatgccgaatgcagcgctatcgattcagctgcagccaagcagaaaagcattgccattgtcggcgctggcatgtctggtctgatggcgtacctttgcttgacccaacagggacttaccagtgtcagccttattgagggtggagatcgtctcggtggtcgggttcaaacggtgtacctgagcggtggccctttcgattacagctaccaagagatgggtcccatgcgagttcccatgacgcttactgttgccaaccagacgtacaacatgtcggaccaccaactcgttttccagctggtagaggagatgaatatgctcaataaagacgacgacgaccttcatattgaccttatcgactggctcgaggctggtagccgtacacttcctcgtgatggtggatcaaaccgtgtgggtgaggttgatgggcaacaagggagacctgacaaccaaggcgctgtgggccagctggggatgtctgtggaggaaatctttgacaaggtcaacaaagctttgccgtgcgaggacttttgtgtggagatggccaacaacatgtttactgctcatcgcaagtggctcggtatgtctcgtctttttcatttccgtggctattgtattaatcaatgttgcagaaaagggactgtttgaccttgccggaaaccaatggagcgagtttgccttcacggctgagtacctcaacaacaatgtcaataatactcatttcggatactggggtaaaggggcttcgtcgttctgggacaaggtataccggtcaaaatctttgtagcctgattagcctgctgacctggtttcagctttgcgaggatttgtatttgaatacaacgacttggaagaccatcgatggaggtacggactctggtgattgcagaagttctgagtccaatgctgatatattgggcacttgcaggcatatcacgacttccacaatctttcgggcctcttgttgaaggcgcaatcaccatgaatcggcggatcgaccgggtacaaccatcactggtccagcgcacggttaccttgcagtccaaaaacaatggcaccggagacattgacagcacgacacatgactacgttctctttgccgttcctttttcggccatgagacactaggagatctcggagctcagcgaaatcatgatggaagccatctcgactcttccatacacatctgcatgcaaggtggcgctggagtttgaaactcggttctgggaacacctcgaccagccgatctacggatcatgctatattgcgggaccagattaccccggcatcgggtccgtctgttatccatcctacaatatcaacggcactggcccaggcgccctcctcgggtcctatatttcgaatccagaatggactgagaagtggatggcgatgaatgaaaacgagcatgttcagtatgttctggatgccatggttggaattcacggcagtgttgcccaaaagcaatacactggcagatccagtcgggtttgtcaagctttggacccccttgagggtgccagctgggcggatcctactgttgggcagcatcagctttacttgcctgagtatttcaagacacacaacaatgtgagattctagtatgaggcatgttgatggccgtgtactgatgagatggaacagatgatcttcattggggagcacaccagctatacacatgcttggattgcatcggctcttgagtcgggtattcgtgggagtgttcagcttctactgggtaagttgatattgaggaagagatggcggcggcagttgactaattttgtgacagagttggggcttgtcgacgaggcaaaggctactgtggaaaaatggatggcgaggtgggttgaagtggtgagtgaagttttgtatcgagcaaatgtcgatttgtgctaacgcatgaatagtaaggagtgtgttgtggattacggtattgaaaagaaaaggaggtgattgttacataagcagtagttgttgaatctataggtgcagcagcttcaaaaatcaggggaaacacattcttttattcaaatttctcagctgggccaatttgtattgatgcacaccaatgcagttaagagttggtttagatgcaagtctgacgcagagatgagactccgtcgccctgcataacaaggagatttgaacggtgcggtacctacagtagtggtgtagcattgctgcgtgtcagagaatcaagcgttgttgttccaccctagcatggagcggctagggtaggtataataaatgtccgagataagggggtgtgatgaggcgggcatgggggttagcttgggggaaagtttggtgcgggtggcacgttctggacaggataactggcactgtgaaagcaggcaaattatgcctcaaaagataaatagtcgatagtcttcagatggtaatcactagtcttttaaagatagttgatgggcctttaaagatatttgcaaggcctattgactttctttcgtggcatggttccccatgtaataaggggctaacttacctggtagtcttgctgtgccaatcaattgtggtgagggtgtgggcggttaggtgccgctggtgatgagggtggtgttgcatgggtggtgggtttctagaagggttctcttgagttggaggtggtgaaactcatgttttgtgggatgttgcattcatggcgcgatgcgcatgatgttggcaaggaagactactgcaactaaaagatgacagagatcacgatgttggttgccgctgtgggctactgctgctaggcaactgcgctctgaatgtatttcaggaggtggatggtagtttgaataagggggtgattttcatacaatgtggagatcatgatgagggtattgtcgaggtatcgaatttcatgtcttgcggcatcgaattactcgggtttatcagtgcgggaacagggagctggggatcggcacgggggagctgggtctggttattgtacggtgtggatgagcggagttaaatggcggtggttctcatttgagttggtgatgaagagagtctcttggatatgggacaagataatgttgtgaggggttgaaactttgccggggtgagagacatcagatgtgggatgtggcaccgcaggcatatgaagaagtcacatcatcacaccctctcacactgtgttggttctatctcaaacctgaggaggtattgcattgcgcgatgagacacaaggccgcaggaacgaaacgatctatatgtatttgggaatatgcctgtcttaagcctttttcctcttcaagacagcctcagatcctggtccctgagaaccgcagtgttggaaccaccttcctctttgggggcttcttctatgcagcttgggggacgatagattaaatttgacacggtgcatgctgaagaatagtcccgactctatggttgaaggctacggctacgggaggaaatggcacagcagcggaggtgaagagtcaaagcacatgatcccatatggctggtggatggctgatcaggttgggaaaatcgttatcagttcaagttgtcgtgtctggagccccagaaaataagcttctgccaaggcggacagagtggaggacgctaggctttgctggggacagccctgtgggggtctggagtgtgatctcttcttgcccagagaaagccgagactgaacaaagcagggaagggtatccggcaagataagaaattctgttctgggtggtggttataaaaagaaggattcaacttgcatatgaagaccatcatcgagtctggagtgtgctgctcatgaagttgccgctcaactgagagacacactggccaagcggggcaacaagtgcactggcaggttacacaagcaggctgttcgtgatcccgtcttaccgcagttttccatctgctggtggacctgttgccaaaagtcgtccagcattcgaaacgcatctcttcaggcacttccaaagtccacaaaacaacctgtcagatcagggcatgctatctcaggaaggagttgcgccaaacccgatagggcggttaccatcttctcagccaaggcgggcctttgaagcaggacatttgccaagagataagaaactggccaatcacacaacaccgtttccccgtgtaatcacgggcttgcttgcttcaacccatcttgctcgctaaaccagacctcagagtggttgcatcggttgggttttcatccagaataaagcacatgaatgacttgtcgccacggatcctcggctcccaggcactgcttctattgaaaggctgcaggtcttggttctgtctctttcttgtttgtctgtcagacgggcagaatatcgagagagaatccgcctgcggggcgccacgagggagccaaagaaaggcggacgcatggttgatcatagcgcttggttcctggtggagctgataaggataagcaaagagatggctgatttctgtttctctttctagtcgtgtgaaaattcttttgtaatccatatcaacacggtcaagatacaccgctttacgggatgggttcaaaggccaatagtttagcctcttatctctggaatggttttcttgctaaacaacaaacaaacgaggtaaagacagcgcatcggtccatcctctattctcgatttgttctagaggccggtacaagtgatgtcggaatggcggtttcgggcgtttgtggcgtccagtttagcctctgcccttacccgttgcccgaggaaggcacatacatcacggactgcgctctccgttgggctgacttgggtgaggttcacggtagaatatgtgtctggtaccagtccatgcacacgaaaattggcctacacgatcgagccactcagtcgatcgagttggcgagaaatgtcacctccacggtcgaatatacagggaaacacgcagagccagccagtcactgcatgcaaccctgcatcggatccacgccttgcagtgacatgagtgactgcaggcgggaacgagaggcacaacctggggaagcgaccaatgatcaacagggtcccaaagactgcctggcgtccaaaagtgtggaatccaatatcaaaatggaaatttgtagacgctctctttcagctacatacaccttcccaagagaggccaaaaaatcatcatggtaaagatcagctgcaaaacgacagcctcacaccgagtttcatcaggtgaggttgacgctgtgaaacccaaaatggtggagtgagaagacatcattggcccgtgtgtcccagccccactcgatttggcaacctccttcttcccctccatcaacctttccggcaaacctgccagtgtccgacctcgcgatgcggtaaacaccttcactttcatgagccgaaagagacgaacctagcccaaccacttggattcatgccatcatgatcgataaggtatactagtttattctcggtctctccaccttcgtaccgactcctccacttgacagatccggcctgacgattttgggggggggaaagacacgatgccaaggccctacccagcgggaagcgtgctgctcgcccggatcaacacgggactcgggagtggcagggatgcagaggacaagacagaccccccaccaaaccgctgagaacgcccagctccttatcagtgagacccaccaatccattgagcatgcagcaccttggcgagcagagcagtcctccaggaagggaatggaggcacttctgagggtgataatgacgaggatggtcttatcgcgggacctgcaaggcttctttgagtcgggaaccccagctcggctcggctgtgatggatgggtggtacctacgactcgagagttgcagtgtattttattaccctagccatcccgcatgatccaggactgaatctttcctcttcactctgcagcctgcctttcaacaaagaccaggagcaccggtcctggcctcagagggacagactctctacttcgactcctcgacaagtctttcaccatgtcgtcctacaaagtttccgagtacgccggcccaacggagatggcccacgagggcgtcaaccccctcttggaagacatcaatgccccctattcggccggtgatttcgcctggatcatgacctgcgctggtcttgtactgctcatggtccccggtgttggttttttctacagtggtcttgcccgccgcaagtctgctctggctttgatttggctgtctttgatgtccatcgccgttgtgggattccaatggttcttctggggttactccctgaccttcacccacaacaccgacgccagccccttcattggcgatctttccaactttggtcttatgaaggtcctcggtcagcccagtgttggcagctccaagatccccgatgtcctgttctgcctctaccagggcatgttcgctgctatcacgttcgtatccttcttggtcaccctccaggtccagatcttgctaacttggtttccagtccggccctcgctatcggtgccgctgctgaccgtggccgcatgctcccggccatcgtcttcatctttatctgggccaccatcgtctacgacccgattgcctactggacctggaaccccaacggctggtcctttgtcatgggcggtctcgatttcgccggtggtacccccgtgcacatcagctccggcgctgccgctctcgcctactctttgatgctcggaaagcgtaccggctacaacaaggtcaacggcctcccttaccgcccccacaacgtcacccacgttgttctcggcacagttttcctctgggttggctggttcggcttcaacggtggttccgccctcgctgccaacacccgcgctgtcatggcctgcctcgtcactcagatctctgcctgcgtcggtggcttcacctggtgcttgcttgattaccgcctcgagaagaagtggtcaaccgttggtttctgctctggtgtcattgccggtctcgtcgccatcacccccgctgctggttatgttcccccctggtcggctgtcatcttcggtgtctgcggcggtatcatctgcaactttgccaccaagctcaagttcctgatcggtattgacgagccccttgatgtgttcgctgagcacggtgttggtggtattgttggcaacctcctcactggtatctttgccgcgtaagtcccttcccccgctcctcattttcaacataaactaacgcccccctccagtgactacatcgccgctcttgacggcgccaccgccattgacggtggctgggtcaaccagaattacatccagctcggctaccaactcgccgattctgtcgctggttttgcctactcctttgtcatgacctgcctcatctgcttcgtcctgaacctcatccctggcctgtctctccgtgtcagccccgaggttgaggagatcggtcttgacgatgctgagctgggcgagttcgcgtatgattatgttgagctcagcagacacgtcaacgacgttcttgttggtggcagtgccgcgggcagtgtcaaggagtcgaacgaggcccctaccgaaaaggtttaagcgttctcgtgagcaaaaccaagtgtgacaaattcaatagacattggcatgactggatcgtgcaacaagggggtgtatagtggtgaggtggcggctcaatgggaagaggggcctgtaatttcataggggatgggcgagggatgtgatggatggaatgatgatgaggatgatgtgaaatatgggatgtattttggtttgttggtgggaaactgtccgaaacatgatacctctttcttttggatatactcagcgagcgaaggagataccaagtttataatctttgagatatatacccgatacatatcaccatgcagcgccgcttgactttctctttgtgcataatatctccaggaggaaaatatggctttctctatggtccagatgaacaacaagctccatcttgaaagagatataactaacaatgcctgccctttgacaggccgatcagtaaggaacaccttaaatttctgtacacctcctaccaagtctctcccgattgatttttttaaccgccggctttcatgtacatgcccagatatatgaacagcttccccccctcattgcaccttctagtaaaatgattctaccatatgttttcaacctcctttacagagcagcagcaaccccagcagcagcaaccacaacagcaacgacatacccattctccctggcagcaccagcagtagaagccgtcgtgctagtaacaccatcatcaccaccatcaccaccaccaggctgaacagccccaagtcccagactagtaacctccgcccccgaaggcgcagtcttcaaactatgcatcaacgagaacccctcactgcactgtcgctgattggtagccacagccaaaaccgcctgccccatcgccccgttgtaaacgacagtcttgcactcctccaccgcggactccagcgcactgcccgcatgtcgagcccacgaggaccagttcagcttgtacgtttcgtgatcggcggttacagaggcagggactgtctgtccgacccagcgggatgtctgccattgcgagcagagggtgacgatgtcggccgagttgatgggggtgtgccccgcggcgggggaggatgtggctaggttggcggtgacccagacggagaaggaggattcaaagtagtctctcaggggctggccgtagggaggggtgggttgggcgttgaggatagatttgacttcgtcgatgcaggcgtcgccccagggggcgtcagagaaatcggggggaacccaggtgctggtgatgatggctatggtggagtcggctacgctgctggggaggggagtcctgatgggtgttggagtgtcggttgtggtgatgggttctgtggtgtcctgggccagggcgaaaggcgatggcaccgacgaggggaagagctttggtgagatgtattttggaggtgaatgatcgtcaatcgaagtgaagatgtgtgaatgatggtgatgcaaattggcatggcgctcaaggaaattggttcttttgtatacgagtcaacccgtcactgtcttctccaagtctgtggctatgcacacatgcaggggccaagtgtaaggagagacatggtgtgaatgccatagtaacggtaatgggttcaaataaattcgaaggaatccgtggcaacatcccatggttccgttcagctcctcaggcatcctcaaaaatgcttgtccaccagctggggccatagttgaggagtatggtaaaaggtaaggtgcttggctgctcattccttcacagttgactgctccttccctcattatgagtggaccgctccttccctcattatgagtggaccgctccttccctcattatgagtggaccgctccttcctctgacttgaaccagtgcctgcctgggaaattcaggccatgggccgcccactgactgcttattaccattgggagtatttaatatataacaccagtacgagcctccttttacgataatgacaaaccttcttgggtattcaggacgtcccatgtgacgtgatatgatctttagaagcaggaaagagctcaagtaacacagaagtatcgcctcaatatgtgactaacccatttataggctatactttagctttcatggttgccagtcagggagccaaatccgagatttctgatgccgggcagacagcaaagtagcaaagtaaaggaggaagatggcttgatcttgtgtgctgcttgggatgtggccccctatctgtcggaggactcatgtataagccgaccagaataacaactcataccctcacccaacaaagtatctaccgagaaacagaggagggcatcgaacacaggagagcattgtcaagcctttatcatcagccttcacacatgtcaccctcgccagccgcctgagctcaaagcctacccccaacagtcacccggacatccgtttaaacttccaccacatcaccaccgcaccgccgctacaacgccatcacccagcacatttcaccacaaacccaccacaaccacacaatccaccccatataaccgccctttccgcaacaaccagcacccgaaccattcactcattcaacccagcccagtcaggttggccccctgtctggtcagtttggatgaggagtaggttcaagggagctcggtacaccctctcggctggccaccgagagactgtgtgttcgatccctcgaagtaaagaaccccctttgaggggcttttcgtagccagaatcacctccgctcccacctcgtggaggctttcccccagtgtgaggcctcccacagtctcccacagtctctcgcagtgttccagtatgagaccgggttggagtctaagccctccgggttaggagggtcgtgagttgactggtgagcttttttgacgtttttgtggcctgtgaggttctttttggttcagattacaacgaaaccactgagcacgagagggttatgtagagtctggggatgctctcacttgtcgaacctagtatttgatctttatacctgcagaaatcttatgcggaacacttgcattgagatgacagatgaaatggctgacagagacacattgttttgctgactgcatactagtgtcagtggcacctttttccacttgtctagaccgttcatcgtagatcgtatggattttacatggtgccttgaaccaagcaaggcttttcagcccacggtgctgccgccatgcctccatcgtcctcaatctcaccaccaagcattacaaccaagcaggcagaaacttgcttccgaggaagacgccattccttttcttttacgagatgttcttataagcttcaccatgtcacgagaggaagttaaattgcatcttcaagaccctcatccccgctttgccatccccctggtgcaataacttggctctcaaaaccccgggagttggtaagactgtattctcagtcagcaggaggcctgaaaggcaagagggcagcagtcgaattagagattaccaccacctagttcaaaactcgatcccagaaagtcatctccagtattcactgtcatgctcgttttagtggtgtatatcccaaaatatgttggtctagagatcccatatctacaaacccacaccgatccgcaacccttttactcttgtgtgcacaagtcatagcccaacgccaatgcccatgcaaatccctttccccattccaatgcccagcaccaaactcctaaatataaccatgcctcaaatcacaacgccccaccaaaccttccaaaggacgaatcctcctccttcttcaccttcgttcccccaaagggctcctcctttttcaccatcggtcccccaaacggatcctcctttttcaccatcggtcccccaaacggatcctcctccttcttcaccgtcatcttcctcttcttggcactatgccccaaatcacccccaaaaatatccccatcctcctccttcttcaccttcttcccacccccaagatcatcttcatcatccgagtccatcttcttcgccgcctgttccctcctcaccctctgcagctccaccaaattccaccgttccgggtccttgcacttgagaagcttcttccgcaggggcgtgatctgagtcttgatgacttgtttctatcacacaatgttagcattcccttcacaacagaagaaagaaaagaagaaaaaagaaacaaacattaagccagtgatccttcctctcaggcaactccctactcaacatatccctacacccctcaatagcccccagcaccttatccctaatctgactcccaatcaccctcgccttttcctcatttcccttgttgttatcaccccctccccccccgggggtatcattcccctccgccgccacaaaatgaaacgtctcctgaatcaacctctccgccaaccccctatccgccaaactcaacgcagcaagcataatctggctcggcgtgtaatgaaagtacgcatccgtcatcaacggactaaactgcagcaccttcctcgccttcgcctccgcctcatccaacctcttcaagtccttctgcatatccggcaaactcgccaattccatcatcgccccccgaagcgcacgataagggtgcttaacatcaaacgcgaacctcaacccctgacacagaagaaactcccccgcgaggatctcctcggcggatttattgaagattttagtatactccgccagattgacatgtcccgtgtcgaccttgcacgcaaaaaacagcgcgacaaaaaacatttccgccggcgggtacgtcatgatgctgtttgtgatgtagaacctctttaggaacatggcggccgtggctttgatctcgtccgcgtagtggagggcttccgacgcgcggaggatttccgaggtgtagtaccccaccagcgtgagctcctctgctggagtcaaaaactccggtagggccggtgtgctgtttccgtctgggtcgggggtgttggcgttggaggttggggccgagaggtcctgctttgatgtcgagacggggagtgggtgggaaagtaaacgctcggaaatcctcgcgcgcgcggcggcgttggtcttttcgcggagggcgctgagctgggttggggagaaggaccagagacggtattgcgaggagtcacggtagcgcgcgtcttcggttgccatgatgggcagtcagagccgtcttgacggatcgcaagctcgtggatatgttcgactgttttagtgtttggttggtcgatcgctcgattcgggattttcaggtgggaagttgaagctttctgattgcttagtaaagcgccatttacaaactcgcgaaacgtgggagaccgctgccacgacacaaaggcgcgaacgttgtcgttgacgtccaggtcgttcctgctgctggcaaaagtcaaggtgagcttcggtccccttggcggtcaaatgctctggcggggcgctcacctcggtgaaaatgccccacatcagatcttggctttgcaggggccaacgcaacgctgtggcgggtctggccgttacccctgtccatttccaacctcactccaacctctccgatttcatcacccaaaagcaacaacacaatcacccatgtcatcagtgtcatcagtgtcatcaatgtcatttcatagctctctaactatactctgaaggcccttcaggattgtaccgagcctgcctttctacaatagcttttaggatccctaaactgataacgccttctcaactttgcggatccagcccacgaaaaaccaaccaagaagaatgcgacaccagacgccaaccagactcgttccttgaccgatatttcctgccgctataaaatccacataacacgtatcccacaatgcatcattaagttcccggggctgagagagcccattttcaccgcctcataaccacacgcatcatgtcgcgtcaccctacccggaacatctagtaaccaacctcccgtctcgctggtactggaggagcaggcttcttggatctgctcggaggaggcggcggtggagccttcttcacgacaggataactagacgtgcgtgtaagactcgcgctccctacactggtggcgggacttgagctacggccccaatccgggcttcccgtatcgctcgtgtcgtcatcccggtcaccaaacacatcgtccttggtggtcacgatcttgttaacagggcgcaactggccacgcaagttgctgacgttggggatgttttggttgacgccgtacaccgagcttggagtgctggcgccggatatccgacctccgccgatacgctcccgctccagactcgcaccgccctggaaagtactagctctgctgatggtggggcgaaccgtaccgtcttgctgattttgaggttgaactggaaggccgatacgtccagtacgagacgcaggcatgcggacaggtggtgcgctcgattcggtctcgtcggactcgtagatcttctggctgctcacccgaggagcacgctcagagaagctctgcgccgtattcgacctggcacggccggttgttgggcgccgttcgatactgccatatgtgctcatgcctccgggtgccggtgctcctggccagttttggcgaacacgtctgagttcctcggcacaccgctcatggtagtcgagctcggcgtccaagaactgcgtcaaatcccgtacgctgtcggcttcagcatcccgaatgtcctgcatacggcgcccaacgtcctcggaagattcctcgtatttggccttggcggcgcgaagctcgtcgtcgattctgaagtcatctcgcttggccttctgggacttggagatgctggcgtcatacgcaaggcggcggttctcgagcttcttgcgggcagcctgtgcaaaaacaattggttagacacaggttcatggggaagcaagcggtagttgtgtacgaacctgatactccttcatcatagccagcgacctctccagcgactccagccaggttgttgtggcctccccaacataagcctcctggattgcggaaaccctctcgttggcccgacccatcgttatgaggcagttgccaaagtcggagtctggttggaactcctcgccgtgtgcaaccattgtgcggcccagataggcagctgggagtcccttctctctgtcttccgcagcctcgacacggcggccaacccatttgacgtattgattcattgacctttggaggcgttccatgcctgtgtcctgttagtacgagaagctctcttcggagtgtgatgggaaacctcaccctcaaaacgaagagccatctccatttcgagctgcttgaagtcatcagacatggtagtctttgcttcactgcccatcttctcgccggcccattggaaggcgcggtcgaacttcttgccaatattcatgatgagggtctggtgtgtacgttgtagatggcggtataggtgagtatgtgcagatgaggaaaaagaggagaaatgtcctatcagcagtgggacagatggcggatagtgtccttatgggtgtctcccggtggaaattgccagcgcacagctcggctgctccaacctcttgaattagtcgtggtggttgggttggggtgtggtatcggtaatgagtgacgtttctccgtgttacaatgacggcagccgattaagaaaggcaaaaggttgggaagcactgcttcgggacgggaacagggtcctatgcagtcgaggaaggcgaataaaagagaggccagaggtatagtctggaaaaagagagtatgggctctgatatatattcaatggccgcgagacagatttgtaccgtaccgtccgtccctcttgattgcgaaactcgtcaaaacgggtgaattggaatcctgtagctggtcgctaggaacaggggtccgccgaacccaagcgggccaggggccactcacaccctgagcggtggctgcagagcgctaaacatgcaactacaggggggtcccatcatccatgcccaccaacagctgacccgcggacctggggtatcagtctgttatcagcgggtgcggaatctctcaatcatgaatgatcgatgtttcccattctgctggttgcccagacacggccacatctcggacaactttgtcgacgcaatatcggatgaaagtggaagctgcagcgtgaaatcactctcatgccgcctcgatatggaagctgcaatggctttgcggaccgtcgacagcagaaatcaccagacaccttccacttacctcaccgtccttaaattctcacatgtaaatggaaccagcatctagacgcgcgactggtgagaaaggcttctgtcctaaaatatcaaggcacccgttccctagactgattcgccccatcgaaacgcttgctggcacgcttgctatggtagcacacgagaggcccattcccctgaccagctgttgctgctgtgggactgtggactgtggacacattgaatggagacctgtcacttgttggatctggatgtcttgggatgtctccgaagacatctgcacgattgacagggttccccgttgctttctgggcgtctggctcccaatcgaccaacccacttgttgaggcgcagcagtttgtgcgtcgcgttcaactcttcttgcttcccccatctaccggccatcaatgagtcgattgctgttcacaagcacatccagatacgagctattcgcaccgaataagagccggacccagtgaatatacttgagatgatgatccggtaccatttccgccaacacgccagttctggtgccacccacaccagcatgcaacctgtaggtcgatattgagaggaagctcttcctgcatccgacacaagagccacctgcttgggccagaatagcctgaaatcgttacagcatgctattcagcgaccacccaccatcacaatcaagtctaggccctcactacattccaacatggtggatggtcggcccgagctcgggcgtattggtgtggtgctgataacaagtcgctgatgctcttgccgttgttcctctacgccttccgactgccgccccgagggggtgtttgcaggtgatcatcgtcttcttccagaaaaagaatcctttcacgatcggaaccattggccagcagaatggcagatccggggcaatcgtagcgccaaaaactaaacgccggagagatccgccatccgccgtcaatcatggcccaattcataccaaatcctcagagcgcctggccagatctgaaacagcacttgaaagccagttgcaaggtccccgtctcttcagcgctgtttcagccttgccttgtcaatctccaatcgactttcatgccttcagtttgaagcctcagtctctgagagccaattgaagctgtctttgatccctttgacgccctgacgatcagaagccaaccaattactcggcgggttccgattgacttgtggttgactaacagggtttatttttagaccaaatgacaccacctatgacaatgacgcttgcgaaacaccgtcaccgtgcttggacagtcatggaagctagagaaaaccaaatgctcagtgatggagtcattggacatgcggctgcagtttggatttgtcctccaccaatgctctttgattcactttccctctttgaagtccaacattttcccagtttcccaacttcaaaacaacccacacttggcgccaaacacaagccattcaaacctccccttcccatttcgcttccgtcgatctcacgttctcatccaaaccgatgggtcatctgtcttcaatgcgacaactccacaaaatacatggtgacgtttcaatgcacttggtgtctttgaaaaacagtgggagcggaaaagccaagacgtctccgcctctccgcctccgtttcccgtcccaaagtgtcaaccccgtaaccatgtgaccctcctctccgactccgtacatacttttcggatgccgagccaagcgttcggaggacccgtcaaatatacccagtgcccagtgatactgatgtagacaatggcgaggccccttaaaccaaaatataatacccccctttccatacctggcctagccattgacgtttaaggggccatcttcatccatcgctgactgctctcaaatacaccacgtgagttggtcgacagcgcctagggaacatcgctcactcgggcactatttcccagggcaagagatgctggcgagctacatgaaagaagccatcggtgtactttacattcggttatgacctccaatacttcccagctaccacatggcaaaacaagtggtaaaattgggagtaatttcaaggccgtgatgtgaactttgatgaaaacttccagatagccgccacacgctgcaggcccaggtatataacatgggtggacatgactatgatggcgatataagcatgcataggattaaaaatgtccaataagaaaaaccgcctgcttgttcatgtcatctaatcagccagggcaatacagcaaacctgccaggtcaaacttctaaaagaagaccttacaccaaaagaaggctaaatagcatgcatagggtatgtaagaatgcatacaggctctgttccaaccggccaatgtcccatctcaaaacgccaattacaacaacataagaatttccagtcccatccaagtttccagtaatcaccctctcaaccccctttacacagtcccactaatgctcagttctcttatctcctgtagcacctgttcgactctgctatccaagtggccctcggcgtactgatctctagtgtccgcatctaggtactgctgcacctgagccattctgctgtaagcctctgcgcaaaaccgcaattggatcttgacaagtgcctcgaatgatggatcaaggtaaggaacgcgtagatcgatgagctgtggcagctccgtgcacaattgttcgttgagctgttcgtatgctgccttggccatgtccatctccttctccgctcttgggagcttggtaacgtccttgtcgggcttttcgaccagcttcttaaccttggcacgtagtgcgtcgtagtcgaggagtttgtggctgcgcttcttgatacctaaattacccgtgtcagagggtctcggatccgggggcagggaataggaacatacactcattcacatcgggaaagtaggcgcaaaatctcgagatgggctctagcactgtcgtccgatatggcccgtcgagcgccttgatcgtttcggcatccaaatcctctactgcttgcttgtagctcctgctcacgccgtccttagcgccggcttcgccgtagaaggcatcgattgtctcggcaatacgcatttgtgaggccgtcatcgctgttatctgttagtacattaccgcttcgacctgctccttctggcaccgtgtgtcctcatacctcgcagagaatcgaggtatccctttgcctccttctgcaaccgcagcgatgccgcctccatggttcggaaacgtctatccaaaatatcagtttcctgttccagcctctttcaaccagcgcatgcgtggcgccgtatccgtacctttcttcaacttcataatcccggtcatttgtcttctcgacatggcctgatcaaaccaagaacagtcagcattttggaagcagaaggaatttcgtcttcggggcggtagattatagtgtagtggttggcatcgttgggggcgaggccatggaagtggggtggcgttgatgttggtgctctcagtgcattaacgaaacggacgaaccggtcttcatcatcacctgcgtcgtagcgcggttgacattcttcttgaagcctgcagtacaacaaaaaggtcagcgcaaaatgtctctggtacatcctcaagttatggtgcggtctacgtacccgcccaagacatgatgggcaactggttgttgactggttggttcctggtctattgcggctcgaaattcaggggttttcagggcgtcgctcgttcgtcccctgttcgaatagggcaatgcgcagtcgtcggttgtattggtcgtcgttgttgaataaagcgatattcaaggcaaagctaattgactgtcaaccgcaggtagtgtcgtggttcaaggctggctaggatgctcgttgtggccgggttgaatctgaaccgctgagatggaaagaggtgacgaatgttgaactgtggctgagccccgcttgactgcctaccaaacccgcgtgcgtgccgtcgtcccgccccgacgacgtcagagcccaggaacagccacaatcccggcacagatcccccgccaagtgggccatctccgagcttctgggctgccgtctgtttgccagctgacaaaccaagccttccatcctcatctcacttcaagccatctcactcactcagaacaacggctttgtgttccaaagttagaatgccttttgagtcactcgccgcggcgaggaggcttacggttcatgtcaaaaatgtataccatagttttatttataagatctcgcaatagactctcatgttgcacctttccttcattcactcatttttgcattctatccaaagacaattccccagccggctgttcaaagcccatttaaaaagtttccacccacagcaaagacacttagaaacaacaccaaagtctgccagaggcagccaaccagcataacgaccaaacaaaagtcccgccggtccaaacaaaaacccgttcaggatccagaaccagtaccagcagcatccatcgagtcacaaacaccagaaatgtctgttcggcgcatcctcgtcgtcggcctcggcaaccccggcgaagcctaccgcaacacctaccactcagccggcaacatcgtcctcaacgctctacgaaaccagatggctgatacgcagccttccttcaaggtagcgcggcatggaaagaagagcacagaagcctccatcgggccaaaatattcgtttttgcaaagtccctgcgttatgaatgtgactgggacatggttcgcaagggcttacagggagcaccttattgacaatgggctcagtccagctgagttgggagttgtactggtccatgatgacctggaggaggagctgggtgtagtgaagattagggactgggcgcggagtcatagggggcataacggcattaagagcgtgaacgcctcgttgaaggctgatccagaagggaagtgggctagggtttcgatcggtattgggaggccggtggagagggagagggcgtcggtttcggattatgtgctgagcaagatcccaaggcatgctagagggatcctggaggagaagggaggtgctgggctgttggctgcgttgatggatttggagaggaaatgggaggcttcatgaggtgcatttaaagggttgaaggtgtgagagaatctgtaccgatatattttgtgatacccaatttggaggcaggagtctatatcctgagttcctcagtttcttcctccattacccaaaaccataccaatgaagaataactgcatgtgtctccccatcacgccaacacctggctgccccgtatacccctcttatggagcggcagtaaacccttctcgtcgtttcggtgtgctgctgcctctaaaagacgcccaaccgtaggatctgcaccgttatcaagaagtaattccactcccctctcattctcagcccatacagcgacaagcaaaaggcgtcacaacatccacatcaaaaccatctcctatgaaccaatcacgtacgggaaacccgataccatcctggggcgtctggaatatgtgatttgggtcaggcgccatactctaaaaggatccgggccgggtcattatgcgaccagtacaaagcccagaacagcgctgtagtgccaaactcggcttgaagctcgacatcgggatcaacgccatgtgtcaacagctcacgtagagctccatattggtccctgagggtagcttgccgcagggaaattggttcggtcgacttcaggacaggtctcaaagagggcgcggaggatctgaggtagttgggtgttagtcagagtatccgatagccaacctcaccaccgtggcttgaacgtaccaactctaaacccttgtctgcggctgcgtgtatggggtctctgactgatctaaaaatgggagcctccccagggccccatcggaaaaacagcaaaggatcgcacacattctttgagttgtaatgtagctgcagaacaaggctgtggaggtgcgggtggctcatgtctgccaacctataatggcccctccagttgctggaagcatactgcacgagtggaaaagtggcgactatgagctcgccctgttgtttgtctttcgggctaataacaaattgctcgaccaactcggagacttatggatccgtcatatatgtcaagcaggtgcgagcaacctctgtattggcagctcgtctctcgacgtgaaactgtgatgccagtgagcctgttatcctatctgactcgagatattcctggaccgaatagtgagcaatcctcacgttgctgtttttgtcgaactcgaggaggccaggacagattttgaggatttcgtcatcaccctccagtatcctgtctttgttgaactggggattatctccgagctccactgccgtggcatggatgagctcgagggttgtaagcggccgtgcagcggtacagagcagtgtcaagactctcctggcatcttcggctaaggctttgtcgatattcaggagtattcgttcgtaggtgtcttccaggttccgagggggcgaggcgagcaagctgttgagatgggtcttgcttattggacaagactggagggctttgaactggcattcgacccatcgaaagctgtgatgtatcagtacacatccacatgtttttgttgacatcgaagacgtctcatgaccaccaaataacctgaaaaaactcacacgccattagcacgagatgctagagcatcctgaatttcctgtcaatagtttttccaccctcggaggcgacgattcgtttgtaaacgagcagcaatgaaggacgcgatatccgagtcaatggaagcgtttttcattttgatgtctccgtcttcagatggtgatagacactcccgaatatcttgttcgtcacggctggagaccaaaagatgtaaccgaggttctgaccactctcgtattacttgtaccgcatcgagcaaatcatctcggtgtctgtcttttggactctcatctaaggcgtctacaatgatgtagacgtcctcgaactcccgaattatggcgtttagagtctccaagagttcgtcatcgggtggcgtggcgtcaacaaaactatcctcgaggcgtttgaggtgctcttcccctgtcttaatctgaccagcgagctgaaggattgctgatcgaagcatagcgatagcatcttgcttcgattcgtcgttgaaagtgaagtagaagtaagccaagccactggtgatctttccgggacgggactgctgctgccggtgtctctctgccaactggatagctgttgaagacaggaccgacttaccacagccggcaaacccattcaaccagaggaaggaatttggtgtgaatagccaagtgttgaagtcagttccttacacaaaccagtggccagttcctgaatgacgcttcttacaggcctcattgtagttgactgacacatctggcgcttttaggccggaccaggatcgaagttcatgggatacttgagtgtttcggatgcggttgagtaccgctttcgtatcctctacatcatcctcattcttcatttggctgtccctcatgagactaacagtggcttttgtgtcttttataccatcttgaatagtaatttgactacctctgatgagatgaaccgcaagtttggtgtcttgtatatcatcctgaatggtcgttgtgtccttttgttggaccacttgaagagccaacgttaggccggcgcggatgtcgtcaatggtttcgtcaagcttctgaagcgtaccctctattattacatacacatatacggttagttagtgggaaatcgtgcaggcttaactgctacttacggtggaaagggtaggtgacccggcgagcagcagtacgtgcgaaagcctcgattttggacgaagcagtcctcgtgagtcggtttggagtaggagcttctgtgagtatcttggactcattgctcaattcgtatatgtattcctcgcactctggaatcgaatgttgtatagtcttgagaagtgctagctcaataggttggaacttgcggtttctaaaatttgagtctaaagagttgagaatcaaaagaagggaattcagcttgctgatggtacgcgaagtgtcggtcttctggtccttcactgttgtgtaatacttgacgaggcattgggtagcttgaatgcccagagaaataaccccaaaaatggcaccagcaacctccatgatcgtggctatgagattgggcagccagatacttcttactgaacaaaaatcactatatgttgtacaaaagggagagatggagggagccaaataggcgcccatgtatgcctcgcctcaaacatctcgccaaggatgcggccacaaacttgacagcggctaagcgcgagcgtaatgtcaaatatttgtcaaggttctgggtacagaatgaaggtaatccgagatctagaccttgtacttcttcggctcgagctctgtaatgtcagcgctctttgcttcaccatccaggatcagttcagccatcaaacacccagtaccgggaccgttctgaatcccccaacatgtatgcccggaagcgatccacaaccccttcacgtaagactgcccgatgactgggtcacgctccgtgccaaacctcatatgccttggcagatagcatgcctgtttcgctttgatgggagcactccccaagataggcgaaacggttcccatatatgcagtcaagtcatcacattggtcttcgtcgcactgcaccaagtctgcagtttctggaagagggatcgaaggatctggttcgcctttttggttcagtcatgttagcttcatctttgtggaaacatgactagaataaacgacagaaactcgacccaagaaacctaccacaagcatatacctcaccaaaaggtctagcatacacctccggatcaacattccgcttatgcttcctcttctgcccctttctcgcccgatgctcaggcacaaagtctgttggcagcataatgtcggtaaagacagcatacggcgtcacatctacctcataaaccacactatgtgccctcaatccttcaatcttggttctaggcaggatcttgcctgtccatggcccggcagaaacaactacatctgtcacattgtccagatcaacaacttcgccgctgtttctgtcttcgtactgtagcccgataacctttgttttctcgctgttgtacttgagacgagtgacctttgcgcctattcggaaatcaactcccttttgttgagcgagggcggcaattgaggtagtgaaatgaaaaggatgaacttgtgctgtttcggttgctccaggttgacccatctcttgatagtgttgaacgactgtagagtcgaaccagtcgagatcttgcggtagaacagaaggcttgagcagggtattggcatcttcgtcttgcttcgggagcttttgccagtctgattctttgtcgccctgggcagggtcaccggccactgagctctgtatcggaagagcatcattgttttgactgtttgtagccaccccatttccattttgctctcctttcacaggtgacgagggtgttaggttcgtcttggttctagcgaggaggtcgtctcgagtaacagtcgctgtgatagacccacatcctactcgtctatatccccagcgctcggcgccattatgctcctctgccaacgctttgtgtagtcggtatgataatggaaccagagattgcgggtaggcccatagcgccaggagcccaccagcttttccggatgcgccagcagcaatcgccgttgcttcgagtagagtgatcgtgtgaaggttcggattgaacttgggatggcgtgttaggaagtaggccgtcgtgcatccgataataccgccccctaatctgttttagcttatagagcaaacatgggagaatggaatatataccgataatgacaatatttcttttctgttgctcctccatttcgcttgctagcttcgagtgtcccaggagaaggggaagagcggggagtatgcgcagcgaccaggatgatgaaattcaagaagataaaacagtgggaaggaacaattaattggatatgaaccgaagatatccggagtcggtctctgtcttccgcctcatcgattgcggctcaaaaagagttgcggcttgcagctccaagtcgcctggggcctgggctcgtcgtcatcaattggcggtgggcggccggcacctttaagcttcccatgtccaacgcggggcaacagcttggaggggcacctttgaggtgctgtctccgagacatgataaggacaatactgcaccacggtttgagaatcttcagttaaaatatagctttggaaatcgagttgatatatatgtgagcccatcagctaccatcaccgcttataacaccagcgaacttcatctcaacattctctgtgcccagtgacgtaccagccagcagccaaccccgcattgctctgccccacaagtcacagactcttggtatccttcttcagggacacccgagacacaaaactcgacagttgacaatgccgctctgcatgaacttatcgcgtgggttcattgtttgcattgccatggcgaacggtaacatcagatgaagttcgctatacccttaaccgagatacacagggctgctccgaactataccagacagacagtttggtgcaaaacagcgcttccaaattccgctgataatgctatccatagatggacaagaacctgtagcccaaatcagatgaagtacaacacagtcaggctggctacgacccacaggttcaaacacagctctctgcgatgctgagagttgttcatcagcggtgtccacggcctccgctattacaacacgggagtggccgtcaacggtattctgcatcttcgaatgtcgatcttccaatcagtggagcccactcaccaatcgcatcacaggacaaacatcttgttacccttcgagcgccgaggcttacagtggctcattttcatcgaaaaagtcccaacattgagaaaagtgcgcctcttttctgcctgcttagaaacccctggttcataacacgccacaagcaaaggtaacagaccaatagacaacatccggggtcacggactttcccaggacccagcttaggattgcgtgagttggtgaaaccgatttggaatcagatagctctttcccgaccccacctccgaggcacctccaacggagaatatatttgtttggtccctctctccatcaacttctctcacgatgtttcttctcacctcacgtcgtacaacatctcacataccatctctatcgagagctataaagcctattttatccgtttctcatccgactcatcgtttacctctaccctatcacctgaacagatccgttcaacctaataaacacttcggcaaaatggcttccgcagcaaccatctatgacttcaagcccttggacagcatgtctcccccctcccccccccatcccacatcccccaactaacccccattataggcaagggccaagaataccccctctccaacctcaaagacaaagtaatcctcattgtcaacgtcgcctccaagtgcggcttcacctcacagtatgccggtcttcaggagctctacaaaaacatcaccgccaagcacccagaccagttcgtcatccttggcttcccctgcaaccagttcggcggccaggaacccgacgccgaggcggaaatcgtcaccttttgcgagcgcaactttggcgtcacctttcccattatgcaaaagattgaggtgaatggtgacaatgcccaccccttgttcgagtggctcaaggagcaaaagtctggcctcctcgggctcaagaggatcaagtggaactttgagaagtttttgattggcaaggacggccaggttaaggggagatgggctagtgtgacgggcccggcttctctggagaaggagatcttggctgagttggagaagtaaacaatgagcggttttgatgttttttttctgtcaggatccaggggtatgttgctttttggataagagggctttggagagggaactgcgagcttggataaattgatacaccctactttttgcaagagaaaataaacatgaataatgagcacatgcgttttgcattggcctatcgggattgctgccaccatcttgcccccataaacacagtattttgagtgtgaggtttattacttcccgacactgagcccatctcgttcatcagatgatgatcacttctttcgaactcattcgatatttcatctcatcattcatcagcctgttccaatcccaaccccacccaacccctcccatcacaacgacctctcaacctccataacctccctcaccccctcctcaatagcagtaacctttactttatccaacctcttcagcggcctcctcgggtgcccaccatacccaaaataactctgaatagcctgcttcgtccccgcgatcgccgccttggtcaacacccagtcccccttcgacagcgtcttctgcagcgcaatggcctcctccgtcttcccttccgcatacaaattccatacttttgtgcaaacctttggcatgacgttcgcgcctccagcaatgatcccgctgcccccgcttgccagagtctgcactgtaaagtcacacattcctccaaacgccatgtaccctgacccttccgcccacggtgtctttgcctccgttgccagcgccactctcgtcagctttcccgtgtttccacatgtgaattttgtcccgacaatgtttgggtgcgcggccaacttgataagaaggtccgagtccatgtctatgccagccacggcgccggggtagttgtacaatatcaatcccagcgggctctcgtcggcaacgctcacgaaataatcgtatatagcctgctcatccatcaagaaccgaaagtaggatggtgggaggagcagggcgtagtcagcaccgacatccttggccagcttgcacagctcaatcgttccccggacgctgccctcggtggcaccgatgatgatgggggtgtctgtgaagccggcctcgtcgagtgcctctctcgtagccttggtcactgctagcttctcttcacgtgtgcagtggatggcctccccgttggatcccattgtgacaaggcctacgaggccgtccttgactagtctttcggcgtgcttcttgatggtggggatgtcgaggtcttcggtctcggcgtcgaagaaggtcatggtgggggcgtagataccacatgggagtggcctccgtggggaggagtggccattggtggcaccattggtggcagtcatggtcgagtaagaagccgaacggtgatgaaggatgttttgagaggaagggaccgtgaaagccaaatgacgcgtggggctaggagtgtggatttgagagtgggcacgtggggagatgttacagtatgagatagaaaaaacagggacggccagggcggaaggccggctacttaagaaaacacatgaacccctgatgggagttgacagtcgccccatgacctaatgtaaataggaaccagtggggttgtgcccgtcagccacgcgcaagaagaagatgtctagtctgatcagacatgggtcttcagacgcttcttgtgtgggatgttgaacaagaagcgggccagaacctccaactcggagccaagtcctccaaattcgattgcagggactgcgggaaggaagggagctaggtcagatgcaacagcgatgccagcacactcatcggcaaggcggccgcttgtggccatcgacaatgtctcgcagctatatcgggataatatatagagcaatggggtcaggaaatcacgcaccccaaagcatccatcggcaaccagatgtgagtgtgtacatcatctggtctctttcatactagagacaatagaccaaacccattcaaccaacccaggcaaccggattttagccaagcgatactgacatccccctatgctgatcccagacacgtctaatgcctcagatgtaactgaggggaaggtgaaggctggttcagagtagttgtcgagatgttcttggctattattcttgaactaacgagagcctttaccagtaatggactggtcagactaccaactccggccccatgatcctcagagctttgctgttgagacaggaactacctgtgaacgaggccattggggtcaaatccagtatgaacagtggatgggggtcatgtgagcagcttgaagcaaagctggacagccacttcagtgcgagaaataacagacgagagcggtgacgttgagaccagacgagcgaacaattgaaaagcaaggggactaatccggtaaccccacaaaaagcgaacaatatgccgggagagctgcaggttgatgttgcgtcctggttctgtggagtagcaatgtttaagcggttcatccgggaggacgcatgaaggactggccggctgacagcgagatggttttgctgagagactgtccttccagttgatgaggatgatggacggtgtatcagcagatgattggtgatccaggtggttctcagccctctgccgacgttgctgccgtgaggtgtcgtcagagaaggaagctgggtgttgcaaagatgaataagaaaaactggagaccggcacctgtcacaaactgcacccacgcttgtgtgtgatactaactatatggccgacggagaaactatttcctccaatcaacttgaagactaggtcagcgggtttggggggagaaaaaggatgcacaattggctcttttgcttgctgaagggaagaaagcttgaccggctttgcgcgccacctcgaagacgctggcgggagtttgtggtgaggcggagccggtgaggagaggcgagctggagggtgtgatgctgatatttagcctgaggaaaacaggatctcttcaatccacagcgatgggtgacctgcatgatgaaccgagtgaaggtccaggtcgctgctttggcctctgttgtcgttgttggagctctctctcggtggtggttgcttccatccgagcttctagcagacgcggggcagtgtgggggtgggtctcatggtggagcttcgggttatttagtttgtttctccacgatatcttgacgatgagaaggaacaaccacctcatgaacatcacaaggtcgttctttccggcctggattatttttaagtggcggaatctttgttttaggaacctgcaacacaccaatggaccaaaaccggggaagaattgacacctatcatacgccatcacatgcggacaacacatgcgatgtatgttgcaatgaattggccgggtgaatgctcttctccaaatcgaccccaactcgcagtctgtcggcccctcttccagaattcttccggatcgactcgaaccacaacttgagaggaattgttgtacgccttcaacatgtatctcatatgcaaggaaccgcctggcacgacaccaaggccggaaaacgtgattgatgctctgccactcatcgaacccatatgtacttagacttccaccatctccaatcaatctcatttcattcaattttggcctttctttcctgcctaacattgacccctggccttggctttgacagacagaatggagccgctcaatgtgttgatggtacggacaattcctcacctgttagctatcgaccactgctgaccaaatgaaccaaggttggtaccggcgagtacaccacaggtttcgtagggaccggtggctcagcatcggacaagaaggtaggcgtagtcggtctctccatgtttgacctcagacgaaggggcaaggttggcaaacttgggatggtgggtgtgaatgggacgaaatacccagcaatcagtgcgtaccttagaaatgtccaacccattcaaacatctggctaacacatccaaggggaacacctccataaaaacatcaccctagcctacaataaccttgacacctcattcgagtccttcccctccgacgacacaaaagatcccgacgcctacaagaccgccatcgacgccctcaaacccggcgatgccatcacaatcttcaccccagacaccacccactaccccattgctctctatgccatcgagcgaggaatccacgtcatgatcaccaaacctgcagtcaaactcctcgaacaccacatcgccctcctcgccgccgccgaaaaacacggcgtctacgtctatgtcgaacaccacaaacgctacgaccccgcctatgccgacgcaaagttcagagccaaaaagctcggtgacttcaattacttttacagttacatgtcccagcccaaattccaactcgagacattcaaggcctgggcagggattgactcggatatctcctactacttgaacagtcaccatgtggatatctgtgattccatggtgtcccaacttggctacgttcctgtcaaggtctccgcctcagcatcaaaaggagtagccaccagtctcggctgtcacgaatcaaccgaggacaccatctccctactcgtgcactgggagaagaaggacgacccttcgaagcatgccacgggtgtatacaccgcttcctggacagcgccccaaaaagcaggagttcactccaaccagtacttccactacctggctcgagatggcgaaatcaccatcaaccaagccaaacgcgggtatgacgttgcagaggatgcagcgggtcagttggtttggtataaccctttttacatgaggtacgcgcctgatgaggatgggaacttcaacgggcagagtgggtatgggtatgtgtctatggagaagttcgttgatggctgccggtccgttaatgcgggagagttgaagccggcggatttggacaagaaggggcttccgacgctgaggaacacaattgctacgacagcgattttggaggcgggcaggaggagtatcgatgaggggagggaggtgaggattgagcagagggatgggaactggagccttctttgatcggttgtgtattatttcgcgcaatggcactatgttggttatcctcctgaacgtcacgccttccaaccccaacaaaggaaacagatagatcaccaggctcagtaactgccagctacgaatcggggcctgctaagcctgagactgagcgggaacattgcgaacccaaaaatttgatgccctaaacttcgcctgagctagatttgccgactgcagatataccctcacggaactgtgcaccagcctgacccggttgtgctcgataaccacgagccctgggcagcagagaaggatttcctctgcgccaagccccatcctcaaggtgccatcaacttccgcaacagtcagcggtcgctcagcagagcagagcaatgtcaagatgctccttgcatcttcgagaaagccttgttcgacatctagaagcatacgctcataggtttcacacaaggggtatggcacagaggaaaacaagctcttgactcgtgcctctaccaccgggcaggattctagggctgtgagcatacactcgacccatcggaatctaggagaatgtggtagtatcttgggaacttatgaatgggtgcttggaaggatataagacttacgatccctccgctctcgagataagagcaccctgaatgaggggatgaaattgtctcaccctttgaaggttccggttgttccgcagggttccagtgacaaacgtctcaatgtccaagtcgacattgttgatcttgacctcctcgtgagtggccaggcgaagatagtctcggatatctggctcatcgcggctagacacgagcagatgcagtcgagagtctgaccagccccggatttcctcgatcgccttgagcagacaccctcggccggtcttcctggggcactcgtctagtccgtccaagatgatgtaggtgttgctgaactgcttgaccgcggtgcgaagaacgcccatcaagcccgactctgaaggtggtacattgaaatggttgacactttggcgtgccaggaggaaaatactggacccctgatgaaccagttgccagtgtttgagtgttgcttgttgatggtgtcgttgtgttggacggatatatcagatgcattcagccatcgttgcatatctgccatcaatcgatcggcccgctccatcctcaccatctcgtggttaacttgaatgccttctatgacattcatgctgcttcctaaattcaacacttgaagacccaatctcagattggagcatagcccgtcaaccatcgctgagagcttccggagtgtggtgtctatatcgtactttggtagcatccttgcaggcgccatacttatcaagtatcgagaagggaaaaccaccacgtaagggataggcgagctgacggatgaatgtgcgcggaaagaaagaacttgaaccgctactggttgaagagcattctgaaaatttctgggcttcgttgtgtaactcctgaatgtggccttcacactcccgaatcgatgactcgagcgagtgaagaagatctctctcatggggttggaacttgcgggttcgaaaacaaatttgcaactcctggagtattgtggctagcgctttgagctgttgaatgatactggtgatgttggctttcgaactcttgactgatgcgtagtacttgataagacattcggtggcctgtattcccaagccgataattccgacgacggccccggcgagctccatagtgaatgtgtaaggcaatgaataaggggtatgtaaggaagtgatgtgaggagtgtgtaacgcaatgattagaaacaacatgatgctggattgtgagaggcaacatacatactcatctgtgatcatagaacatgaacacctagacgctggacgtctatcggactcccttagatgactcgccaccggccacacataccacccctgcccacacccatcaatcaaataaatagctaatcaacctgcacgaattacccgggcgcgcacacattaacaatcaatcaattaagactcactcgcaccacaaactactaaaatacatataaccgtaataggctttttcaataaaaagaaggcctaaatatatactacctttaaaatacctatgtggtggtgtcgtagctgtatcttaaatatatatatttggtcgtggactttaatgttgaagtttaaaaatctgggtgtggtgtccaattaggcctagtgacgagaactagccttatcctaaacgggctgtcgtcaggtgacctgacttacatagcatgtgggaagctggtccgagttgccagtcatttaagagagtcccgtctatctagagttgagcatgtagatccatgatggccagcgtctcgatgatcaccatcgcgttgtcccccgtggtgtccagcgtctagatgcccagcgtctagctgttaggcgcccaacgtgaagcgccagcaacgtagcgaagcgcggattaccactgtgtgaccacgttgccaggccaagttttgcacctgtagtaaagtgtaagcgctagagagcgtgattagagcatcctacggcggcaatatgaactgaatggttttcacgatgtcaaaatgcttcaaacatgacacttgggttctgccttacgagcatacagcacagtgttgattacagacgcactgtgaatggatgcatgatcttcgccaggcaggcctcgtcgaaacaatgttgataccccttgaaggccagcgaagcgccgaccaagcctcacctcgccggtttctgtgcttcctggttaaagccgaatattagttatcgcaggcctgctctcaaaaaagatatcgcgtttggatccagttttgctctggtgaccgagacttcatttgatcgatggtgatgctgcggctggacagtgtgctcagcttttcggcgcacaaaccatttccacacaacttccagtttcttgaccaagatcccaggatgcgagattcaaaactgtcgcctgttcgatccagttctgtttgttcatgcggaattcgctgtcgagagcatgtcgattctcaggctcccttgtggtgataccagactgaagaaaatatcaggataaaataaatgaaaagaaggttacagcttctgctgatcgggctggtaacccgtttcttgcttcgtcttggacttggaccgagtgtggcgccacagctgagagagcatctcaaaatctcggagcgttggttggtcgaaaccaggcacaactcgtggcgtagagtcccaagaaggaacaccagcaccggcacttcgcggtgatggggactgggaacgcggcgaccggagcaggagtagcgtcattgttgtggctttgcaacagggccaagccaggcgctgcggctgtgtttgcagcagtttgacagcaacaagccggagggatccagggttgaggtgacaaacctgcgacagagatattgacatgcaacgtcaactccatcctaaagctgacgaccacttgtcgattctgcaaaatctgatctgttttgcaactgaatatccgtatccggtggttgttttgttttcgtcctttttatcctgtttttgtggccatcccatctccaccaaacgaaatacttgacgtcgcacatacagcctcgttccctgttggtagtcgtcagcttttgagtgcgagccccatcgagttccctgggcaaccaagcataaggcgagagagaagccaaggaaacctccagcttgcgcaacctcagctctttgtatcttctgtgcagtcgcagccctatcgtcttcagcacaaacacaacaaactcccctccgaattccttttcgaaaaaccttggccggaaaccttgatcttctgacaggcgggagggcgtgcgcaagcgcatagcaacattaacaccaaccgacaccagacgaacccaatcgaaccgagcgccggacagagagcccctccaaagaaaaaaatgtgggaagactttgagctcgacgccgagcaaattccggcctttaagctcgcattccacatagcacagattgtctttgcgtttgtactatggtgcctcgagattgctgtgttccgggccgagagcgcaaagattgtgggcaacaacgggtggacgttcgcagtggtatgtctcaaccttatctgtatcccctcactttttaggatcacaagatactgacgtggatatgggatggtagttcttcttgtcgttaccagcatggatctacctcatcggcgcccctcgtttcccacgaacccgcaagatcgccaacccgacggtgatggtcttggtcgacgtcatcttcaccatcatctggctctctgcctttgcgacacaggcggcgtataactcttctggtctttgcggagatgtttgcggtatcagcaaggccatcgtcgccatgggcgtattcgtcttgtatgtcctacccctcccccaccatcttcacatcttgaataacccgtactaactatccccagcctcttcttctgcgccaccaccttcctaagcatctggaccctcaaatactaccaatggaacaaccgcctccccggctacgaccgcggcgatcgcggcgccggctccgacagccagaacatcgaccccgacaaagccgccttctccctcgccccccacgacgaggaagcctacgccccggtcaacatccacgacgccgacgacgacgacagacccgctccctacggcggtgccagatctgactactcctctgacccctacggcgcccccaagtcggattactcggacccgtacggcagcgctgttggcggtggagcggccaacgcgagcacaatcggcagctcataccaggacaacccgttccgaaggggagaggcgaacgcgaacccgtttgatgacgataccgagtataactctggacgggtgtcggctatggggatggggggtgcgtctacgctgggagggtcgatgaatagtaggtatcaggctccgagtgtggggacgtatgatgaggaggaggataggacggggccggcgaggtttccgcaggcgaattatgatcaccttcatcggtgatcgatgatgaatagaactgatgttgagttacgaacgggggcttgatggtcaggggggatatgaaagcgaaacgtgcttgggaaggtcatcttcagcaaaagtgcagcgaatggcatgtcatggcttgatgggttaattggtggggaaggggtgtttactgtttctgaatgattttgtttccggagggcggagtttgtacattggaggcatttggctttgcgtatggttttattatacaatgatcacgatatacaaacctctcatgaaatgtctttagggttctggcgtcaggtggaagagggggacttgttcacacgaaaagggaggtatcatgtagttgaacatgaggatggtttgttgcatgtcctggttctgaatgtgcgaatggtggctttggtggctttgtttgagcacgaggcatggttccagttgtagccgtgatgaaaggtttaaggcgtatagaggagttgcagggcatttctcaaattgatatattgaagaatggcaacgcagaagatgtggtgtctgtccaagatatctccaaactttggttgccatcatctcatagggtttatgatgaatgttaaactaacaagtggttgcccaggtggcaggacttccgaaagtcttgataatcatctagttcaagtccagcaacctgacctaacgacctgctcaaccgcctgttcgaccgccttcgctaatttaggcccaagtgctctaatcaaaaccacagatttttccatttccgccagatcagatgaagaccaactataaacgccagaaaacgccggtattatgagtgacatgaacctcttccccatctacagccgccctgtttgagagccacactgtgaggctcaatttacatcctcaacagaagccccaatgtagcagaaccctctcagcattaaacgcccctaaatcagccccgccttcttcaacctcctcttcaaatccccgggcgtctgctgcatcggatttaacttcatatccctcgccatagcacccacatcctccccatgcctctccaccaacctctccaaccactccctctccctatcactctgatacctcggtttcgccaccacttctcttcccgcctccctttccaacgccttgagaacttcgctcttctcatacgtctcccccgctagcccgccccattcctcgtactccttcttctctgttgattcaccctcatctccagactcgaggtcgtttagcgggtcattcaaagggttggtatccttgatgatccggaggatctttcccgtctcggggtcgcgctcgacttttacctcgcggacgcggagggagccagagttggagtaagactgcacggcgagggggtcttggacgtcggtgcggagtttggatttgtcgttgggggcggtgccgcctgttgttttgcctagccttgcgacgaggccgaagcgggtgtagttttgggagagggtctgtttcttgtccctggtgacatgtagagttagtgagtgaaatgggaatatgtgggagagagagggggagacaaaccagttctgggcgatgatgctgtttcctagggggttgagagccttcgtgcggcggttgggcatcttcactttggagcgcgaggagcgcgccttgcgcttttgaagttcgcgacccattttggattgtggtggggtggtctgagggaggggttaaggttggtgatggtgttaattggtgcggtggttggctgtggtcgattgcgctgctgctgtcgctgcgcttgccgtaccatggcggccaaaaattctggagttgagacgataagggcgataagataagatcttttagtgggttggctccttatcgatcgggctggttgccttcttatcgccgaattcataacgccgatgactctccttctcagccagggcagctgccacacttgctgccaactgaagagactggcaaccgattcccctccatgattcagacatgcagatgcaagattggacaatgcaatgttcctgtcttcgcgtccgtgacaacttggaaccgtttctgttgacgatcttctttcgaagagaccgtcatgtctccgtctgaagctataacacagctctattaagccttcttcaccgtttcttttattgaatcccagcctcgcgtgactgtcacatgcaagccttgacgtctgaagaccaaggtcacctctcttttcttggcaggatgagcttggcctcaacagcatcaacccctctcacaaatcgcccgactggatgagaaaatcccgctccgtctcgtaggaaacgaagtgatacccaaaagcataccaataccgaagaccacacacactcacggttcggatctggtaggtgtctctgtccctcagagcatctcggtgtctaaacttaggtcgtcgagccgttcgatgctgcccaacacccatcgatatctcgcaaccgccctccccccacgctcacgttcacaagctcgtgaggtaagcagggagagatttctcttcagttttatctgcccaacatccgagcttcaggacttgtctcctcagcggtagccgatgagctcgtccgtccgaacacagaccaccacggcaatcacgtcttccgccagatcttgaattgccttcctgttgcggtatggcccggtgtgatcgcgggatgccaacaccccctccccttccttctacggagcagatgttagtcgcgacgctacgggagggaaagacaacctgcttcttgcttgcagcttgcaggacatgcttgcatatcccgtcttttttgctttgctgactgtcgttggaagtacctccaaggtcaacagccagaaaacagggacgttttgtcccctctctctctctctccacctctttttccccagataaagcaacccaacccttctccccctcccctgttgttggtcgtgtgtgcacacaggaaaggaaacatgacccctgacgggtacattgtgtgtttccaacatatcccgcaagccaggtccagggccaaaagatagtaaaaaatgttcctatctctatatcgatgacagcgcatatctgctatgatccaggttcggtttagcaaacctgatgagctcacaatcagtggtggtagcggtgattgtgggtgtggtcgcgtgcagcaaagcaatgatgcaagccaccaagcggtagcacaccacaccaagtttgttcttctatcacgcctcttaccttctagacgggttctagtctttctagaaggtcgcttctatcagatttggttttgctgaggtggccgatcaaattcgatagtgttgttgacccccctcttcccccctcaccttcacttttgtggcttgcttggtgtgtgctagggttcccttcttcttttttgttctgtgcagcttctagcggggtttttatggaggttggtggtggtggtggtggtggtggtggtctggacagatcaacaacatgatttctctactactctcaccgaatcagtggtgttgaggtagggtagaggaagcgcggttaaccaacggggtttgtgttgatctatggagtttggggttggggagttctccaccgcagatgaggacaaaccgatagagtctatacggatacgggataccgaaagttgtcggcgatttttttctttcttcccttcttctgttttgcctccttcgtcccctctctcgtctggaactgggccagccccccccagtttgtgctggatgaaggtgtggcttgacgcctcctcctctcctcttcatcgtttcccctatctccattatcctccccgtcttacaaacttacattgccgccagcgagccgccccatgtacacaacacccctcttgtggtacagtagttccaagtcccttcccccacgcaactttccccttgaaggttagaatctccgattgggcaggtcctttgtgtatgtatgcacattctgacccctgaccttgagacggctacacggcgagcggtcctgttctcctcctcaccactaccacccaacagttccacagctgggttttgcctcttgctacaacagtgtacatcgagagagccaccagttgagggggaaacaacacacacaggcaagggggagggggtaagcgaaggcggcatggggggaaaaaagaacacactaaccgcgaagcttgtcgttcctttgcgttccttgttggctacaactttgttgatggagtcgatggagccgttttgcattttttgcagttacatccagattgcgtgctttatctctctgtctccattgccagttctccacttgtttgtcatgttcaagaagaggttatcgtgagagacactgtagcgacggtctgttaagcgcggctttgtgctcaaaccgggtaagccacctcgattcactcaccgagacattaacttcgagaaggtctgcaacggtaggttggcaaggactagaacgcgggttgtaaccagctggcagtagtgatgtgatagagatacattagacttgacgggggcaggggaaagggagggggaacgtcgatcgattgaggatgtacctctgaagtattcttctggtgaggtggtagatctgatgtaacatgggataccccgaatgttttgcttacccacccgaggagggggtcagcaagctgtgtggattgtgggagggaggagagggagagtcccgtccgaggcacagacgaacctgacactttccaggaaagaacatatgccgagctgagactgtgggcgtctctgaagggctacccgagatggggacacactcgctcacacggacagtcatccagctgagagaagtgtgcattgcctactgagatgagcatctaatgcggatatggcacatgacacctcgcgtacagcatgtatgaaggctcctcacaagactccatgtccgtgccatagagctcttcataggtagttgaacatttgtcaccagtgttttgcatgtgcttatagttggaagagtgttgtgaatgttttgcaatgtttttgtaaaagtttcaacaattgtatctgataaaacatgtacccatagcttcctcctcttcccccccgccatcaagaacctgctcttgttcccaaaaccctgacaggtaaaggtataaccacggtagctaaataagtaggtatatataaaaagtaaaccaaaaaaatgatataataaacaaagagatgtcggtatgtgtgttgtgtgtctgtgtgtgtgtaatgtgcaggtcaccatcattgatgtacctcactcactgttgccataaatccagggcaactaggtaggtaccccccctttcatatcatatccgtcccaatccatatcaacatcaaaacataatccactccacctcctgatttcccccaatacacttgatccaattaaacggcccgcccctctgctgctgccccgccgtgcccggcctcatcctgttgtactcatccttgacttgcaccccctccccagcccagagccgctcaagcacttccaacgcggcaaggttgttcatgtacccgctccggttcataatctccctgcacttggaccggacaatattctgctgcagctcattgacgcactcgcttcccgcaacaaaaagcggccagagcagaaacttctccgcggaggaacccgcttcgaggctggtggcgtagtagaccacctgagaaaccaagttgcggaagttgttgtgggtggagggggagtgagggctggcaagacgctcggtgtacaagagcgcggcataccggaaggcttcggagagggagttgagatcccggatctgagtcgcggtcgggggtggggtggtgccattgacaccagcgccaactcccattcctactcctggggatgtgggagaggaagagagggatggaagcgggagcggcgggccggtgagcgaggcccggacgcggttggagtcgaattcccaggtttggagggcgatgcgggcctctttccactcgcgccagaaggcgctgcggtggtcatcgtaggcggaggagggtgattgcatcgagttggcgccgagatggtcattgtcgtcgagggtggagccaaacccgttgccgtcgaagcggacgctgctgttgatggggtggggaaggccgccaaagaggctgtggtggtggtcggggccgctgaggaggggagatgacttgaatggcgcaccgagcggggagacggcacgcgaggtatcatttgcccgggggagtggcgaggaggcgaggaggttctggactggccgctgctgagaaagcaagttaagtcggccaagtttgataatggtcctgaagagctcgcggtcgcagccgacgaggttctcagctccgggtgggaggagctgtgcatcagggagaacaccgtaaaagctcgtgttgagctgggcttctctgtcgttaacactggcggagatggcatcaaagtatgtgaagagcgcctccatccaggccgagtctcttgatggtgggtaaggagacatccggcgcatgcccagaatcttcttgactccggcaaactgtgtgtgaaacttggcaacccctgactcggccattctgtagtggcagagcaacaagatggtggccaaaacggagtcctgtgttgacttttccgcgtcgttgagctgctcgtcaagtaaccgtactgccaagtttctgtgttggtattcttcagtcaatgactgatcttgcccatccgaggggctctccacgggactcttctctctcatgtcgaaactgtgttgaccgagactgagtttgcgcttcatcctgaggttgcaggcggccagcgcgcagatggcgtgctgcaagctccggctgctgttggcaaggccaagaatatgctctcggaagggattgttggggccatcgataaacaccatgctagggcacatggacttctcgtagtagtcgatgaagaatggcatcttagtggcgagatctgggctcatctgcaagacgggtgatggtgactgtgaaggatatgagttcgcccagggggcttgggtcctttcattgacgctgcaggagagcgaatcctcatccgcgttcgagggggcccagaaagagccgtggtgagactggacactgcttccgtacgtgtccaagtcaggcgtgccaggagcttttgcgtcttgaggtcagcgtatgtgatacggttgttgtgggtaacgaaactcacccatgacgtcgcattcatgtgggagcttgcgactgagctgggcttccaaggactctacatgagacatgtgagattgaagactcgaagcgggttctgatggaccatatacgaggctggggcaagaggttggtgcccggggctgctcaatcatgatgccacctgttgggctctgtggaacgggcgacccgtgattgtggaatccgtcgtagacaatagggctgtggatgtattgcggcacgtcgtctctcggaaacgagtgagcaatgggagacatgtagtcaacctcgctcatggtgtccaggggagtgtggatcatttcccggtgcatcatcatgtcaccaggagtcgacacaggaatgtgaagactgcgtggtggaggaaacctcggaccatctactgggggcatgctggacgagaagggaatgtgagtccatcccggcggcgcggattcggtaggagacatgtgcgacatgtcgtaagggtggtggtgaaaaggaggtatcgtgatagaggggctccgcccgtggcccatttccaggtcgccgcgaactgcccgctcatcctgctcggttggccactgaccgttcgaagtgatggaggtcgtccgagagcgtgtcgtggtcgttggtgacttgatgctggaaaggctcgtcttggcttggttgactggtggtgcctttgcaatgggcagcgacaacccgcgaagcttgccccgactggccacgccaacaccccatgtgagctgcgtcttgtagccagagcactcgttaccaatctccaagcactgcgagcaatacggtctcctccgatcacacttcacattccgcttggcgcaagtaaagcagtcgtctgcggccccgccggcgggggctcttcttctgcgcttcctggccgaggcagcatccttcgctgctcctgtcgacggcgtgttgattggtgcagtcatgatatctgatgatgatggtggttgtagtggtgttgatccgttcaaagtttccaccgctggttaaagtaataagtctcgatgtagttgctggtaaggccaattccgaattcccgggaagtctcgtgcagatccgcacagcagggcaaccgacagaaggccttgtgaagaggcaagtgttattgaacacaaggtgtggccctcgagagacagcggatgctggctggagtgggtgaacgggtattaatatggcaagactcggggcacatagcacgctgcgtgggagagacactggagcctgtgtatgtctcgcagccgagagggaggttgaacctggaagctgggaatggtcgagatgagatgggatgaagtgggatgggatgggatgagaaatgaatcagattgggaaagagggcaacatatgagagcaaggcaaggccgcgagccgtgtgtgtggtagggtgttctgttttattaaacagcagctcccaagcacctcagcacttccaccgaggcaccaagcagcaagaaagagacacacggtctgcatgcagccccatcccatgcccggcaacctgacccccccctcccctccgcctacccctaccaccctccccccagtccccccgtgcagcgcgccaacgcccccttctcacaggtaccacccaagtacctccgtaccgaccagggcccaagggaggatcggtcggaggagcggacgaggttctggagtgggtgcaacggccgcgagctgggggcggcgacgagttacaacaggtgacgggcgggagttggagtctggtcagtggagagggccaaggaaggccccattgcgtcccacattctctctttcacctgtccaccatatccatccactcgtccatgatagaccccagtcggatactcaggtgagacagtgatgattttcggaataaaaagacggttaagatgggttgttgggctgccattggaggggggagagcatcgaggattgagagtgagatgggcgagttagcctgagggattatggccagtgaagtgtaattattccgactgaaagggagaccgaacccagatcccaaaggcttcagaattggccgaccggcaagagctgaagaagtttcggagataccgcaaatgctccgtgccctgacggtctgtttcgagctctatctctctctggagtctctctgtcaccgctctctcgttacaagagttgtgaaattcatggcgtttggggcgctaaagaatcccttggtcaaccgaagagcttgtgtttggcgactgcgacgtacacaacagattcaagagtgctgtcgctgtcactgcgaatgcgagaatttggagcgaggttggcgttaacaggtcccctgtagagatatcccagcgccagcggggcagcgcgggggtttgtggctgaccctgttgtcccgtccgtttacacatgtagtgccccgccatctgccacagttttcactgatatcttgaactttcagcaacttgaaccggatcaacctagttcgtacttaccaacacttcacattcggcgcttttactttcttacagctggccggacgacatctcttgttatcacaaacgctaacacgaagcatgaggctccataaaatcaaaatcacggcaaaacaggcctctcaatgccaggaggtcccgctctggctggactgacccccatctgacaacggcgtcgtccgctttgagcaaaaccgcctgccagtcggttatcatcagattgcgaccctgtgccggtacctattgcgagccaggcccgtattccacatcaacaagcgaccgtcccgtatctgagaccgcattgacgacgctacccgacccgaggacgccaaagggaagatgcaatatacatttgatagtccctcgtcagcctcaagcccacgaagcagccactatatcgacagccatgtgagacatcctcctctcgcaatgcaacaagcaatagcagcaagcacacgatgtattccattgaagctattgcgcaggagtgggggtcctttcaacatgcgttgggtttccccatcaccgagctagtgacagcatttaatatattcggccagtcattgtctggttactgggttcagcaaacactgacgacatgcagcaccagtcgtggtctctgccttcttcaggaatctcgtgagaccttcctggtctcggtgggagggtacttcattacaggacatcagaaacgactaaaatagtctgataaggaaacatgttttctgcagatggtgttgccaacttgtcatgtcatgtcatggtcagaacaagaccattatgctgcatgatgctgatcacgaccagcttgctcaggcacgcccagcgcccaagacgaatcagccaccgccgaaagccttctgtgcaggcttctagagaccttccacactaggcctcagagatgctagtggtggaggctcccttatcagcacacttgctgtcggccatgcccgaataatcccccgagcagttcatatcaacaggcgggcagcaatatctcggatggtgggccttgaaaaccacaccgaggctttgaggtttattattaacgacataaggcgaaacatgatcgccaagggtaagggttcgtgggttctgagccgagaaacggagttcatcagagccgccctcacgccctgtcgtccaggggtcaataacggagaccagaccagggcgaaactgacgccagaagccacaatgcacgacatcgtctcgatgacgagattcgcttgtgacttcttgatggagctgttggcagtctgagctcgaggtatttttcgctcgtcgaggacacggtctcatggacccttcgcgcagttttccccttcgcagttggtacctttgccacatacaagttctcactcatcatggaagacgacatatacgtacgttgccttgattcgctgcgccaagcaccgcacacggctcgccgctgacgaaggaaagacacgcatcttacaggcccaagatgagcaacactggatctttccagacccggacaacacttccgtcgacaccacaatagagaataagcaaggtcggcaagtcagaggccacggcacggccttgacagcgcttccgttctcgccaaggaaaggggttcgggaggggttgtcaggggatcagcttttaaacgaccacactcgagatggacctcatacaaactcgtttgtggtgtatcgagcaagtggttcatgcgctagcttggggactaggtcagtcgttacaccctgtaccctgacctctctaactatcccctcttttcgttgtcaacccaactcggatatctggcatgtgagctcgctacaccttgaacttggcactattcctatccgtgtggtcatcgtcaataactcgtcgacatgcagcgatatcatcagagccaggtcattgcgctccgttgaagcggtccagaccagcgccacagcaagggcctgaagtaaacctcaaacccctcatcaacacagcgcacacggcgatatttggtgggggtcacgttcgagtggtcgccgacttccactgcatgcaagagccaccagaaaacaagtcgttgactgacaacaagacactccaacctgcggatgcagccggacgaaaacggcgtccttctcaacgttcgctcgaggctcgcgaggctcttgttcggacactaaaagacggtagcgtcttgtccaccgccagaccaagcaacgacaagtcacgcgctggcaaagcagccaagcggtagcaagagacggcgatacagccacctgcatttggctgccagcgctagaagccagaaagaaacatgcatcgaagcttcatctcgtcacaacttgcgccccacaattcccttatccccccatcctttctcgttgcgaaaatgccattgcgtttgtggacgaaacggcggcttctgaacctgcaatttgggcagaaacgtcttggctatcggcgcgctggacggctacacactttagtaccttacgctatacttgcctgtttctcgttgctcgtcttcacatgctgatcaccagattccgttctctggtcctgttcgtgattgtcgatcccaagcaccagcaaggcggaagcgattaatagcatcgtggcatctcccgccgggctggcagatcgacactgcgaggtgtttctcagctgaggtgcaagcagcgggtgataggctgaagccttgtgtgagaggtgtcgcgaaacttgatcaacctcaagagagggttcaccaatcaccattcaccaaatgcaggctctttgtgagatgtcgagggcagacgggattgaccgccataattggagttcccctcacttgtctggccttgcgagctacaccgcttcagggcaatgaccgaggcccttgctgcacgactgattggtctgtcgggttgggagcaactgggcggcggcggcgggttttgagtgcagtgagagggtgagagacgggagtcgggcatccggatctcagagttgtggtgaaccaagagatgtggctgagaaaacggcccttttcttcccacggtcggcttgcggccctggcggcttggccctggcggaccggcactcttggggcagcacacgtctttacgtagcctcggcagtctggcgtcactcagctgcggttgtttgctgacaagcacaaagctgaagacagtcaaagcctccgaggcgccgctttgtcgccttacttttgatattatatactctgatataggcagaatgtttgacgttgttcggagatttgtgctgggcaggaaaactgagggaaacaataccgacgagacggacctactcggcgtcacgctttccataaatttgtcagcctgtctgtcagctcggggaccgttccacatattaactggcaggttcgttgaagccatctaagagaaaggtcctaccctgctgggggaatccttcctgagatatgccaacatctggttcagcagctgtcagtttgacgcagggcatcgcgatctctctcttattcatcagcagcaaattatctttaagctttttgtttcttttctcttgcagcacactccgaccgtttgaaaagcacacccactgttctgcgctgcggatggaacgttgcaatcttttgcgctattccctgatgggttaagcgtcgattgcttggttaagcggagctgggactagggctggttttcttttcccccgcggcttggccttgttttgtctaaaccctttccgtcaccgagacacacgatttcggtttctctctccaccagagagaaaaaagtatcgagatgtacctcgggcatgtcactctgtttcctttggttgttggctagtgagtggtgttagtcagtttttacgaaagcgagacgccgttgggaaaactaaattggcgccgggctacgatgatagaatgacgagatggggaggctgatttggctatctgatgaaagtgccatctttttcgttgtccatgactcgggcttgaggaaagcccaatctgttcctaacgtcagaggagggtaacgggaaagccacaacgggagccccccactgcatagttcacgcgcgttgtcgccacaggcaccacctagagagaaccagcgttcatcccgtccctgcgttgcgtgcgctgctgttggtgtcatatccatacatagaacagagctgggacgactctgtacactcctataattcgtccaagcccctggggttatcgccgatgatcgtttgccacgatgaggaatatctccgtttttttcttttggttgggtggtgtgtgtaataggtacctaccctccgaatgtgcgagtcttctcctatcattgctcccccccccccccctcatcattctggagaagaggtgaggggagagtagcatctcgaagggaaaaaaagcggatatacgcggggcaaaaaagtccggagagggcagtgatgttcaaaagtacccgggggggcggaacgatttgcgcgtttgtctctgatgaggagggttggggatttggggcggcgactagggacaatggggcccagtgagaatgtctctccttactttgcttggccttctgttacctagtttgttcggatcgaacctaatccgatttggggtacatgtctagagacacattgaggttggagacttgaccgaatcgaggggtaaggtagatgcggtcggagacggacggaggaatggttggagagaggtttgtaggggttgtgaggggaggcatcacgagatgtaagttgcgatggggacgtaggaccctggtgttgacgagtgcttggacgttgaggtcatcatcattagtcaaaagttcttcaggggacagcaggtcagtactatacttctgccttcggctgtctaccgccttccggtgaccgcgcggtcggaactttgttctctggctaccaacggacgggatgggtactggcgagcccattcccttctgcttggggccgccggtagctaagtaagatcggtatgcagtcacgttttcttttttctgaaaatagcatcactagccctacagaggttgggccatcgtgtgcgtgtcctacacgagccgttatgatgccggcacgaggcggtatttcgtgtttgtttgatggatggtaatgaggcaggcgcggtgaggcagggtcagttaatatcagcccgtgtgattctctttttgcttgttctgtcgggggttttttattttcttatcctatcactcttcttcttcttcttcttcttcttcttcttcttcttcttctacgcaatgttctactgccttcctttcttgatctcgacacacaattgggcccaaccaccaggatagagagtggggggaggggggcatatgttgagatggggtggtgttgggaacgtgactaccttgccagtctgccgtgacggaatccgacaggacgaatgcacaagagggaaaaataaatgaagtgagaagaatcaagaggtggaatgggtgagcgggaagtggaggagaggaggcactgcccagcggtttatattactcgtgcatgaggagtcttggagggatgacactctgccttgggaggcctgggtgaccttgcctttctcactgcgcgcacggcggctgtcatgggcttgggcttggggggtgatgctgtcgatgactttccttgaagaggatggtcaaccttgggtttggcactatacagtacatggccatgtgttggtctgctgagttccgagcacttccgagcgaagggatgcgaagggatcataatcacagcaacaagtgtgctgtgattgtacaatggtggtgggaaactcatctattccagcttatgtctgctattccttcccaggttttttcttctgctttgttgggcaatatatctctttcctgcgtcgctgtgttgctttccgactggacaagacatgtcacggacgggacttgccacacgtgggacttttatattaaagagcaaaaggagctgctggtttgggatagctttctcatgtcttggttgctgtctttacctggtttccttcttgatgttggcaagggtctgttcccaaagagaaaggtggcattgtgtttgatgcttcttttctgttgttctgttgcttttcggggaggaagagtgttgcttctatcacgcaccgcgcatgcagcggaagcatagaggagggttctaataatatgttcatgtatcggctcggtattgcttgtggatcaaggacccttgatggcatcatgacgaagagatcatgccgcgattggcgagtgcccagaagaaatgcccaggagaacaacccgggtacttgggactgtggattatcacaaggaaaccgttttgatgacgtttcctgatgcatgtatggagcttgttacattaatcttgatggctcagcgtgataggcggtcacgagcgtttttgtagataacgtagattaaagaagacttgttgagtaagatgctagaagtaagatgtgataagcccatttcgtgggtcggtttgctcatcggagcggtcgtgctctaaccattagtctggaagtataggggctgtcaggggcctcagggggggttgatgacctgacggacttcatgtcaacaaagatgggtttatcaacacgtagggtagataaacaaagacagtactttctctgcttcggttccaaatgaactagtgctactctagcgttcaaatgctatattaaatagctggagagtctcttacagaagaggtctatttgacactttttttagtcaattttgcggtgcctcgtgttgtggtctcttgtcggtctaacagtgaaacggtaccatgataggctttggcccacattcattagcatctcgcaagaatgagatactgccattgcattctcgatgatggtatgaatcccagcttggagatctgtcggtgatagaaaatggctaccgaggaatgctgtccactcacatggtacagcatgaggtattcgtaaagtttgtttgccttcacgcttcaataggtatgaaatggttcttaacaatggtacgtgtacagcaaggaagtattactgctcactagagattcgccagtgttgacaaagtcagtccgagtacgagaaggcaaaactgacaggtcaaagaccaaaactgttgaatcacaaattgcagttatttactggttgtactcgaacggcttttcaccgcaggtaccacaacatggaggcggtgataaaccgacgtcaaaagcctctttgacttttgactggagcgcgctctgtgtctcaacaaggcattagatgtctaagcacgaaaagcaatatctttcagccaccgaatgtgagctgtccttggccacgaaatgccctgttttcccatccccacacatgattcccatgatatttatgcacaacagtctcaagccactgtagtacaaataccgaggtatggcaagatatcctgcacggttttctccgagttgaactttgtgcgactctcggtctgacttcttgatccatgaagcctgatattgaagacgatcaacaagtccctagttgtatctcttcaagtatcaaagcccccctaacacagtgatgctcgcctaccgcccacgcggcttggagcatcacggtctaagaatgttgcacaacatcagagtcagctaacgcctcacatctcacacttcacacataactttcggtgttttcaagccgagctgagatatacctaggtagccaagtgatcaacatgagagttgagttttgaagaactgtcaaggatctcagatccggaggcaaaggtggcgtaagggtctgaatcatgattgtgtctaatgatagatacatgtctctgttgtcttggtctcgtcaatattcgggtacatccgggattatgatgccgaccagagtcaaagttctgatgttggacaacatcgatggtgttatacttcgggggtcttcatgtgaagtggttcttgacccgctgagacaacagcacaccagatagatgacctcaaggctgtctcggctctttagttccgaacgtcttgtgtatcatcaatactctggggcgatattgatgtggagatgaatgcgagccttcttgtttggcgacaatggtgggcatgtgactggtgtatgcgtctggctggacaaagacagttcttctctccatgagcttcaatcaaaagaagtaacccacaggctttatgctggcaaatagcccgtagaaaatgaagtcttggtctctgagatacttggtacggtaatgcctggcttttgggttgagggtttttgaacctttaagacaaggctttccggagtgaattttcctttgcggcgttgagaatggaccaagaagttgtcatgatgggagccaataattttatacaggtatggatagggaaaaactgccctcataactgatgtttagcgatgatctacacacatacagaactgatattcaaggggtgtggtcagaggccaaccctaacccagctatcttgaccatcaacttacagccaaggcagtgaggccggagtacggattgctggattctgtacatcctttccccttgtttccattcctctttcaactcaattgactcatatataatctaaccataacaatgccagcaagagcaaaccttcgcatcccttcccgcactctctttcaccaaccaagagtgacgtcatacctctcatctcaccccctatcccctatcgccgacaagcctcaccaccaacgacttcacaatcgcctttcacttcgacttcatataccctcctcctccttccacacatattcaactctagcaacccctctcaccatgccaaaacgcaaaaccaccaccaccaccactaccaaaccaaccaccacccgccagtccaaacgaaccaaaacaaccaccccctcatcacccccatcatctcaccccgccatgtcccccttcccaaaagcctcctccttcttcacccccctccccccctcaaaaaccaaccgcctcctcgaaccaggccccatcctcctcgtctcaaccggcaacccccaaacccaaacccacaacctaatgaccctaggcttccacaccatgatctcccactcctcccccaccctcataggcctaaccctcggcccctgggaccattcctactccctcctctcctcgtcaaaagaatgcgtcctctccatcccaaacctcacccttgccaaaaccgtcgtcgacatcggcaacatctcctcttccgacctccccccctccgaaacaaaatgggaccgtttcaaactagaccccatccaaggagaaaaggtttcctgcgcgctcgtcggaggtgacggcataatcgggaatttagagtgcaaagtggaggatgagtcgctagtgaagaaatacaacttttgggttttgagggttgtcaaagggtgggtgaatgagcagaactttaggctggatgggacagcggtcgagacggacaaggggaagatgatgcatcataggggggatgggagtttttttgttggtggggaagaggtgctggatttgaggggacggatgacaaagtggaggatgttgcaggattaaggggtgcgagggaaaagattatgaggtttaggtgattggggatacaagtcatggacggtatggtgaatcacaatggtcatgatgaaaataaaaacacacataaaaaaaggtcatttggaatcgtctctttttagcagccaaccccccaaaaatgatatcaaacaacaaaacatttccgtcgccgtcataagccattccaaacataccatagccagctagcctctagcacctgctctaaaaccgccagaaagcacaatccagtcaacacaaaagaaaaagacggcaacaccacccgcaaaccaaaacctagcaataaaaactagagtacaaaactgtggttattattgcacgctgagctggaacattgctaataatccatcggcgcatccaccaacgcaacgcccctctgcgccccattacttccactgctctctctcttgttaatattctcattgctgctcggaggtggcgtctcggtcctgttcgaagcaggcgttaccctcctccccgaggagaaccgggcaccgcttctcccgaggctgttcctcttctccaacacggcctcgctatcctgctgcgctacctgctgcacctgaggcacaatggggagggcaccccctaaaaagttaccatcagcggggtggctaagccccatgctcgcatcgtccggcacctcgaggcttgtcctcttggggagcacagggcccatgctctgccgtttcctgtgagcctgtgttgggctggaaagaccagtcgagatggggaagcgagtctctggtctgcccaccgacctatcacgggcatggccacgtgggccaggagccggagaggtagcacgagatctgctgccctgtgccttttcaaggagcacacggttgcgctcttccatgtgggctttgcggttgctttcgtcggtggagatggctcgtgggcggccacctgggttggcgcggagggttccagacgcgttattggtagagagacgcttgagttcgttgaagatggcgtccttatgggcgaacaagtcacggaccaagcggtaggcatgcttctcctccatggtgagcgaggtttcggtgcgagggcgaagcacgcaaggggccaaggaagtagcgagcttgacgatgtactcctcatcggcagaggtcaggtcgatcaggcgggtgaagtggttcatgcaggcatccagtgtggcaatattagtgagcctcaattgagacagtgtctgctggaggatgggcacgcgggcggcatcgctgtcgttgccggtgggggtagtatagatggttctaataatttcatatacgtgcgaagaaaccaaagaatctgaaaaaatgtcagtaaagcccagaaggcatatcgcaaaggataaaaggacatacctggaagctcaagaaggtataatttcaacaggctggcaacagtcgggatgtcaaaatcggcaaaggtttccaacgcaggcggcttgccattgttgaccaaagctctcaacttgtgcgtttgagacaagggaacctcgtggagccacacccctctccgggcctcatcgccctcgaggtctggatagtgatgatccaagtaggtaagcagcgttgtaacgataataggcacacgctttctgtcagccctggctcgggcctcgagatccacaccaaaggtctggtcatccaccttgttgtagtagttctcgtacgttacaaccttgggagcaaagctaccggtgcggtagttctccaagagatagcgcaagtcgccaagcggctgcactgtttcctggaacagcatcatgttatccacggtggcctggaggctaggaataacgttgctgatagtgcccgagaagtccaacacaactgtcttgatggccttgagcctatccagctcgcagcgctcaagaaacttgagatgtaggaagatggcctcctccagctcgcacctcatttcatccagcttcagaacactggccttgtatttttcgtccgcctcccgggcctcccggcgcatacgctcagctggcgtctcgttcggcctggaagtgttgagcacatcccacttggcgagatattcagtaacagtgccaaccacaggcgagtcagaaccatcagacccagaggtgggcatggagaaggctcttgaaatcgacttcttttctggcacaccagacatctcgaaagccttgggccgccattggtagtgcatctttgagctattggcgaacgtattgccaacattaccaaccagtctcaggaagccgtgcgttaccaaatcctggccgattctctcggcatagctcacgcttgagcttcccatgtgccgttgaagatactcgacaatatcggttcccgcagacgtgttttgatatgtgccgagaatggggaccttggtctcgcccatcttgatcgtattcagcatgtgctcgaggatcttcttgacttggtcgggggtataagtctcgtcgccgatctcgtagggctcctcctcctcggcaatctcgggttcgaccttgatttcagggatatcttggccagttttggggctcgtttcggggtcttggaacgccagcttattctcctcctccaagtcttcgagtagtcggcacttgttgaaataggtgcttcggagctttttgcaaaggtcggcctgcttgtcgtgcgccttgattcgagactgcagctcatcttgcgaatcttgtatccgggattcgtgggcctcgcaccagcggccaaaagggttcacaaccaggtcgcgaatattctgtgcaatcttcttgtgattcttggccgcttcctccatctcggtccgcacaccttcataggccttccgcacgctggcgccatcgtcgcggttgaaccctccctggaccttgtcgacggtcggggcgatgtcggatagcttgtttccgtagatctcttcggcctcggcgcgcattcgagcaatggttagaagctggcggttctcgacgacaccttgttggagcttgccgaacaggacacccagtccttgaattctgtcagcgcggcccgttcaccacctcacactggacatgccaaaaaatccacgcaagaaactcacctgcggcgtagtcattcgaccagaacgagtctgcgaaaccgggcatctttgcgaaagacgaccgattgcgctcggcgatggcgtgtactcggaacgggtggtagaattagaggtcaacggctcgcccgggaagaaaaagtcaaagactaaacaaagattcgaagtgctgtgctggtcgtgaactcgtaaagccagtttcgagagttggcccccagaaatggtggatgcagggggaacgtagccaaggaggtgtggtgtgcgtctccagcgcaattgaggctgagtgtcttacactacggagtagctggtaccgtaccgggcagttgggtagaaatgttcagaagaaaactcggttggtagggcgccggaaggccgggtctggaagggcacgcgacgggacctgaaggtcagtgattaggaagcaatgggacgggagaaaaagaagcttcagttgaacaacaaaaaagttctggattccggcgcaatgatggaagcggcaagaaagcaggcaagtgtcccgacaaccccaagatgcagaaacccagcgccatcgccgtttcattggccagacagccagagcaccgaaagctttcactgacgaccgacaagaggccaccagcgggggcctgcccctcaacccctgcagcagattgtggcccaccaaatgtccaccattcacctcgaaacgaacagccggaatgcccttgctcaccgacttcttgaaacgtcaagtctcttttcagctagagacacctcagcagtacaatcaggcttgttggagagttcggaatgtcttgtctcgctcttgttggttctgggcttcggaggacgaacgaccaccaggcactgatgacgtaaggagaccgttttagaagcacctgaagaatagtgtagggctgtcaaccagcctgggcagggtccagctcgcccagcctgtccgtgtcaactcacgatatcatattcttgagcatagcttgtctggaaatctgcggcacaatcgtgtagggagctcatgaactatacctgtctgacagccaacagttgccgacgggatacggatcatgtcaaccgcagcatcctaacaggttggttggtaagtaacatatcattctgttagtgcacagatatttttcttaacagcaacagagagaatcagcgagaatctcagtgggctcaaagcacgtcaaaaagtacttcataaaccaattgaatacaggcttctgaaattatacattgtattattcatgataccggactctcatcaaaatcccaaacgcttgcaaaaagccctaaaaagctgtcatgaagcttggccgagacactctccctttagcgacccgagtctaaggattgctaagccgcgtatcaatccccgtctccgtcccctgacgtctttacacccgtatccaaacaaatctgcctcgccgtctatgcagcttcggagcatcgacactatcgtctccaaagaacagaaataatccacagagggttaagttgccagttccgatgaagtcggaccgataccccaagtgggccgagctcgaagccggcgacttcggctccgattcacggtcacgtcggaggccggcaagggcgaagagagtgactttgtgtgttgtattctcatgcctcttactttcatatctgtttttccccataagcggtgccgggtatattccccggaggccccccgcgtcaaaaccacagctgccaaacagcattgaagagcgcgtcaagcacatcttgagccatacacccttgattggtaagtggcatatcaaattatctatgaacctggggaatgacttagatatcagatggacacaacgacctggccatcctcctccgggcctactacaacaaccacatctacaacgacaacttcaccaagcccttcaccaaaggcggtctcaccggccatgttgacatcccccgtctcagggccgggatgaacggcggtgctttctggagtgtattctggccctgcccgtccaacggttcagatttctcagactccagctatagttccagtcagtctcccctacaccctaccacatccataggtacctaacacacgtcctagtcgtaacatcaaccttctcccaaatcgacctcctccaccgcctctcctcctcccactcagaaaccttctcccccatcatcaacatctcctccctctccgctctcgccgccttccgcaaaaacaaccagctcatctcccccctcggcatcgaaggcctccaccaaatagccaactccccctccatcctccgccaataccactccctcggcgtccgctacgcaacgctaacgcacaactgccccaacaaattcgccgactccgccctcgacactcttccagacgacccgagaaaagtccggatcgcaccccctgttcaccacgggctttctgcgccttatggtgtcgacctcatcagggagatgaacaggctaggtatgattattgatttatctcacacttctgttgataccatgctcgatgtccttggtgggaatccagacaagacaaacgggagcagggcaccggttatgttcagccattcctctgctttcgccgtctgccctcacccgaggaatgttcctgatcgtgtgcttgatctggtgaggcagaacgggggggtggtgatggtgaattttgcgccggatttcattagttgtgttgagggtggggagggggagttgccggtttttgatggggagaatgcgaccattgagcaggtggtgaggcatgtcaagtatataggggagcggattgggtgggagcatgtgggatttgggagtgactttgatgggattgagagtgtaccgaaaggattggaggatgtgagcaagtaccctgatttggttggcaagttgttggaagagggggtgagggatgaggatgtgaagaaggtggtgggggggaatgtgttgagggtttggggggaggtggagagggttgcgagggagatgcaagagaaaggggagccggtgatggaggatgagctgcatagtttgtggtgattatcggtggggtttcttttttttttttgttctttttttgtttgttcattgcttgttgtattgtacactagaaacacagatttcttttccgggcccaggctgttggtttttttcagctcctgcactccgggataacctctaacgccgcgccaatggtttcttgtctcctcttccactctctaaatcctatataaagttctaccccttgcgctcgactctgttgagcttgatggcggtcttgttctggtttcttgtccgttggccgcggacgggcaggttcatggcgtgtcttctgccgcggtatgttcccatgtcacgtaatcgtttgatgttatcctggatgatctttcgcgcatcgctttctatcaccatggttgataactcggctgtcagggctgtgacggtcttgggcgacagcgtgccaatcttggctctggggtggatggagtgcttggccatgatccgggtcgcagtctgagaaccgagggcatagaagtgttggagggctttctgtggtcgggaggttagaatagttgttcatcatcgtcggtcttggaggggcaggagacggcgcacctggacaagcttggcctcgtggaaattgacaccgaatagggacacctgatgatcatggttagcacattgcaagctgtgggaaataactgggagctcgtaccatgttgaagaatgcgggctgccagcctcaagtcaccgtctcgttgctagcaatcgtgggccagggccaatgtcgtcgcagacaaggtcccaacttgaattcgagatgcgaccgggtcctgccgattaaaaatccggcggacgtttggcagctgggtgcagccggcagaccccggcatttggttgcctggacttgggctgcaagccaagcaggggtcttgcccaaaatgaatttacaaccaaaattcattcgccgagtgagtcgaatatcagagcagcacgacgactcacacacctcacaatcatgagaacattccaatcacggccagagagggacctcccctactcggatgagttctcctctgccgaggaatacatcgagagcctcctcgacttcaccaccaactcagagacctttcgcttcctctgcggtggtgttcacatattggactttttcacaaccgaacccggcgtcttcgttgcagctgtgcccaaggaatggcaagcttttcttctggagaaggagccaatggttctcctcgattttctcatgcgggacgacctgtcatctctctcacccaaccgtggccccggctcacctcccgagtcgcttgttcggtatgtcaaggacatcagaaaacattcgttgagacggtcatttcagcctagcaagcccaagctccccatactgccccgatcagtcgcccttggtatgaagacaaaaaaggttcacgaagtgacccattttgccgggtacatcgacaggctggccgaggacattgctgagacccggggcaaggacttgactcactttgtcgactttggctctggtcagaactacttgggtcgtactcttgcaagcccaccttacaacaagcacattgtagcagtggagagcaaagaagccaacatggctggcgccaaggacctcgatatcctgtcaggcttggccgagaaggagaagcgagttcggaacaagaagctctaccaccggattctagaggccacggatccgtctcagcataacgacgaggaggccttgaagcgggtcgcaagagaactcggtgtgacggacgaggagcttgccacgatcgatctcagatcacgcaaggagatgcaggccacgtataccgtcgaggaggggaagggaaccatcgagtatgtcgtcgggcgccttgagcacgccgacctgactggtgttctttcgcagctgaggggttgcgaggaggaggttgaccaagacaagctcgctatgatggcggtatccatccactcttgcgggaacctctcgcattatggtattcgttccatggtgctgaacccatgcatccacgccgtagccattgtgggctgctgttacaacctgatgacggagaagttgggtccccctactttcaagcccccgttcggtcgaccaagtctgcagcccatcaatgctcgagttgcacgagaagcagagaagcgagacccccagggcttccccatgagcgagcgggtgtccacttacaatgacgacggggtccgactgaatatcaccgcccgcatgatggcgtgtcaagcgcctcagaactggactgagcaggaaagcagcggcttctttacccgccatttctaccgtgcggtcctccaaaagatgtttctggacaggggcgtcatctcgcggatctatcatggtgaagagactgacaagagtgtctttaacacaagcaccaacccggtggtaatcgggtccttgaggaagcagtgctatacctcattcgctgcctatgtccgtggagcaattgcaaagctgaccaccaactccgagttcagccaatacaacgaggtcattacagagaagatggggaacatcacggacgaggaaattgctcgatatgaggacgagttccgagatcggaagagagagctcagcgccgtatggagcttgatggccttcagcgcatgcgtcgtagaatccctgattgtcactgaccgctatctcttcttgcgcgagcactccgatatcgtccaagactgctgggtcgagacggttttcgattaccgcgagagcccccgcaacctggtggtggttggcatcaagaggtaatcagacattgggcatcgatcaatgcgcaaagtttctcattgcttcttgtatgtggtgatcggttggtggcccctgagttttgccgccattggccgccggcagacttcggatggttctttgaggtctcgactgtggctagccgtcaacgatattgattccttcgggccgaacctccagcggccagccgaatattgtccagtcgccgccaccaaacctctccaccaaaaggccgagatttgacatgtcagatcaggaaacccagcagaatcattatgaaccagtcccgtgcttcaatagggccgaagggaagacgccccccgccttttgctatcgccgtcacacccatggtgcattcctcgaacctgcgtcgtgcagtctggttcaagctgggggcgcagcgactggggagcgtggcgtcacagttcatgttggttgtcaagattattggatcaagttctcgccggtcttttccgcccggcttccggccaggtccagatctcaacatgtctcatgggcatctgagccatattccacagcggtcacatccacctcgatggatgaaacttcgcgaagcccgaggtgctcaggcgagtgtgtgctggcgatgggggctattgttacgacagaatcgactcaaccccaccctggagaatctggtgcatcgtggttttctacccacgttgatatccggcaactaccaaatgcggactggccgagcagtgggattgggtctcttgcccatcatcaccaagctgccggcagcacactatgacaggaacctgagagttgttgaacattatcaacgggtattatagcaacagagctttccctcgtcccccctttctcgatcttgttacgtgggtgtttctatgccacgacacgggagggctgatcagcagggcggggaaagctgcagctcccatcccccggtcttttgtcaggaacaagatttttttttgttgaaagctcgccgaggtgtgtgttcctgtgtttctccttggtcaattttactccgagtctcagttggctttctcccagccagtttccacccctcttttttccccttcttggcgctgtcgacctggacattgcaccacattgtactcatctctcgcaacaaacacatgaccagccagccatcagctttccgacgacagtgcaggccggttgctgtgcggtggtggtacggtctctgactggaggagtctaattagttgccggactgctgagtgcggggcaatggaacttggcaacgccgcaacatgagctctcaccagcaccagcacgacggatgatggatggagagggtgatctgagcggagacgccatccgagggtgtccaccctgtgaacccctccccctctatttgcttcggcagctgtctgatctctagatcatgatctttcgagtgagagagacctcggaggagcatccgaacccctgtctcaggagcggcacgcctgcgcaaggtgaggaccggcaaacgagaagctttctcgcttggaggttaggacaccgtcggctcgtgaacccccacgtcgacggcccaccatggctgcacgcaagttgcatgcagagagggccccaaaaggtgacaggtcacaatcccttgggactctctttttgcgatcgcgtcaggtcatgggaaagggccaagctgtcccgagtggaccttttggcgtcagaattcagttcccgatggctttacctatcatctatggagttccatatgtaagcccagagatcaatgtggccccattgatgccgatcccttccttatctcgaccccatccagagactttgtgtgtcttttctgctgtcgtggttgggaattccataccgtaatgctacgcccttgctgctgcaggtgagaacctttatggccggctgtggctgttgctgttgggatgaaaaacagggacggctcaagcgaacaaaaacaaacccaccgtccagttgcattggatgggaatcctgattccataccttctccgtccccctgagacacagatgcaaagagttacggaaacagaatagaaaaagggatgcgtcgtgcgtcactgttgcacaggagcgtgcacatcacacaagctcgcccctcccagctctgcgcggcacacatgcaggaggcagacagcagttgacctgacctcggtgtggtgttgtgatatttcgccccagtttgccttttgtcgtcggttttgggttttatcagttgagagatctgatataagaagctggtcttatcccccactaccggtcctttttcgtcaccttcgtggggctgttggctatttggcggagtcacccccgtcttatacaattacctatctacgggatacggtacggcatccgtccacctccaccacaccacttgttcagccatctttaaagtttaagctctcgatacctccgttttgttcatttctctgttttcttatcagttcccaatccctcgacccgacaacaaagagtacaacacggcccctcccttgacaaccgttcacaaccccgcccgcttggtcctcgggttgcccgcctagcgccggtccatcggtgttgcaacggttgagtcaacggtgcacccactctttctttatcagccttataagtcgtgcgatatctggagctggtcgagggactgctcggttcgagggcgctcatctaaagacagaccaatggcgttgaccgctcaagtacacttcttggtgagtggattcatccatggcagaggtccgtgaaccatgactgattatcttgataggatggcaccttgagtctcatccacatccccttgagcctctaccctaccttactccagcccatactccgactcctccttccacaaagccgtggctcaccacccgatctgaaccttgacagcctcaccctggacagcagtcaacatggcttcctcaacatcagcgtcacccctctcgagtgctccatagtctgccactcctcctgggccaaaacaatctttgaaccagccatcaagcaactaccccacgacgcggccaaaacagtcatcatctccaaagatgactacgtcgtcttctccgtcatcagcgtcgggatggacgccgggtctcgagtagcggatctcacctcccccttggccctagccaacatccccctctttttcatcacgacctattactctgacttcatcctcgtcccagtcaaagacaggcaggcggtcgagaagacgttgctatcacgggggtttgtcttttcggaagacaatgatgacaacttcccttttacatccccttacagcaccaaccacggcaggggggcgagtcaaggcagcagcttgaacgaactccccaccacggcccgacaacaaccaccaccaccgtccgcgatcccggagctccaagagaggacgtttgacaatctcaaaaagaggaacgtggtcccttatgtcgagcagggtctgctgctggtgcagtgctcgggcaggcaggagaataacatgatagggggttactcggaacggccgtctacctttcagactaacgggcatgggagccgcaaccggcattctgcgcacaagccgtgctgggccgatacggttgatactaagctttatactggactggtgtcggctttggtgtcccagccgaggtttttcagtatcacactggcgcaggacgatccgccttcgttgctgctggatagggagttggtggggatttttggggatagtcttgttggggcgacgacggaggggggggtttcgcttgtgccgatttttctggacttgagcagtctgcctatcgaggcgacggggattgtgagcggggtggcggggacgttggtgaaggagctgaaggagcagtacggggtggtggcggaggaggaggatgggggtggtgggaggagggggagggggagtgcgcaggaggaggagctggagttgagttttttgagcacggtgagggcgggggcggtgattttgggggaggaggttagtattagggcgatggaggctttgaggagggttctggtgagggaggggaagtgattgggggggttgaaaagagaaggggaaaaaaaaaagatcaaaaagggacaaggtatggggattatatacaaggcataggttgtgtgtgcgttcatatcaaaagttcaccacttcatctcgtattacaaagtttcaaatatgggtatccttccaactgatgactgtcgcatcctgtccgtgacttccaatcacttgaaccgatggcatctttcgcacccctcctgctagtgtcatacccagccccctcaaaccttcctatccaaatccattccttcctcctccccttacccaaacccacatcggtgtcacctccccttcttcctccccccctccttctcctcagtcaccaatccagccctgacaaacccatccctagcagccatattaatcaacgcgaaccgcctcggccccagcttctgccctccataccaccgcgtcaccaccaccatgacatcccacaagtccataacctgcatcaggtgaagcagcctccctcccgcggccgtctccccgtcgtcgtcacaatcttgataactcgtcccgttttcgcctctgatccgccaagcagtgatattannnnnnnnnnnnnnnnnnnnnnnnnnnnnnnnnnnnnnnnnnnnnnnnnnnnnnnnnnnnnnnnnnnnnnnnnnnnnnnnnnnnnnnnnnnnnnnnnnnnnnnnnnnnnnnnnnnnnnnnnnnnnnnnnnnnnnnnnnnnnnnnnnnnnngagtcgccgtagatggagtttagggctgcgatttcgtcttggagggcttcgttcattgtttgttgtggtttcgggcgttgatgagggtttgtcgggagatgtggtgaggattgaggcgagagaatgtgttggaggtgtgcgggatggtgaggagtggcgtttgtataagtggtgagttgtgaaaatgagaggtggttgaaattcgggtgaggcccacgggtgagttgaataagtgggaccggggtcatgtcggctcgggccgatgcatcgatgctgaggactcgacaacgagacatctcacaaagcgataggtacaattaccattatagttttatttctgttactggtcatatctgggtcacttgtgagctttatctctcgttaatggcacgaaagtctgtctacttggtatgtcatgttcttacagttaaagacatcacagccaacccagctcagtgagtctctctcaagtccgcaatggggaacagtttcttgggaggaatataggtctaataagtcccctctgaaactatgatctatttctcactttcattctacctctcacccgacaccaacgctttgtcaagaatcacctgactcatccccatcggtttggctctcaatcagcttccccccctaaatattgggcatccctcaatgaggcattgcttgcagtgacatccagaggcaaactcccaacacaaaccctttcttgccttctttgataccacagtttggctaggtgagtcttcttgtctctcgttcttggcggcgcctacacgctctgacacagtgaacaatcatcggcagtcaggcaaaaaaaagttgggtaaaaggagaacaatctccatctcttcaaatttatatcctctcttttctcattccatcaacacatcgaaacaaaagacagcttccgaaataggcagtcaagttgcaagtctagcgcaagtgttagtgtaacccctcctccccctgccccccccacctttccatcttgccgcgacatccccggcctttatgaacaagatatgaactgagcccaactgaccttgataaacagatttaacagtttacagccaacagagaagatattttcaccaacagagagtcaaatactcaagattccaaataaagcaaaacaaaaacaaaaaaatggtcaccctagaggatattcaacccagcgtccaagccgacgaggggactcacacggccttcttttacggcaagcatctcaccccccttttttcccacttacaatttcatactaagcagaaaacaaataggcaccctcatggtcccagacgtcttctacaccgtctgctacaaccaatccaacgtcccccccgagatcaaagccctccacaccttcacccccgccatcctccccggctacatccgccgccgcgttcgaggcgccgactaccccggcatcaccccggacaaagaccacaaagtctttggcatgtacgcctccggcctcacaaacgccaacatgaacaagctggacatttttgaggggggacagtacgtgaggaaaacggtcgaggtgaagttgctggagaaggtgggggatgtgaagggggaggggaacgtggaaggagagacgaaaaaggcagaggtgtatgttttccatccggatcacgaggatgagctggaggatagggagtgggatttggaggagtttagacgggagaagatgcagaggtggacgagggcggggtatgtttttgatgggtgtgatcccaatgaaccggcaaaggtggaggctgctgtgtaaggcatggccggccggcaggagagggagccgtgatggttcggtgtatggaatttgggtcgcgagtcaggtgagaggaggagacagcgataatgtggctttgagttctggttacgagatcagcgaggtccccgtcagcgaatgtggattgatctgtcatctttagatagagaatgagaaagatgaaacatctgggttgtgtgtgtacactgtggcctgcggcgatggcggccgttggatgttttatgactaaacttggggtcgacggaagagcggtctgcgccacaggtgcaagttgctttaatgcgatgacttccacccgggttgtacgagaactcgagtcaacttgccgaactgctgcatcgtggacgacttggcggtttgtttaagaatacagtaacggcccgtggtcacgcttgaggagggcggcaagaccggtaactatgcccaattggtgatatatccatggtgttcatactcttgtggtggtgttgttactcttgcagtgaggaactcgggtcttttcgaatacaaaagtgaacattaagctctccagagttctaaagagatgtcaggtctcacagatgaattgattccaaaccgtgtgagaaaatccagcccccaacctggcgttgggaaacgaccagacaagacaaaaggtgagggatgggtagtaggggtcagttcaacggttttatgccccaacaaagaaacaaaagtccatgccgaccgtttatatcagaatttacctactcgcaaatcccatcaagtgagcttcgaattacatgcaagtgaacaaagcaggtgccaaaattgtaggtagatgctccaaagcaacagcccaaccagctgaggctaatgatccgtcacaggggttgttggccctaaaccccactgaaggaacgctaagaaccaaatcctgcgggagatgacgcagctagcgcagatcatttcagaacatccaacgtgcgtggggctggttgcatctttttgatcgttggtgatggaacctcatcaatcttcaatccttgttccaacaaaggaactggcatcatattatgtgtggtacattgacgagcccaacgggatcatggccaacaatcacaacagtctaggcaactcttccacctctgccatgaccaactatcaccacttaaccattgagaccgtctgaacttgtcatctgacctgctcaacagctcgggaagctggcggcacacttcggatccgcagatcgatgctgaggttcggctggctccgtccctggtcgacggcaggccgaagcctctcccgcagactctcctcttgcacaagtgcgccacgatagcgggtcgcgagaccccagaacataccctttcatggacctcactcagcccgccgtgccgcgtttgccgcaggacaacatcaacatcctctgacgccggaaatacggatctgtcatggaggaacagactgcagagcgactgattccgtacccagccattgactttctaggccgtcgacccagcaaggcctcttgtgacctgatattccgggggattgtatgatgtctgtggggactacggtgttgaacctgggatgcagccggctggaccctgaacggtcagccctactaccaggtcttcaaacataccccaccaggagagaccacaatgggaaccactcagcttcgttgttagtcggccggtacaccctgctccattaccggataggcgcaagctgcgacaagacgtgctgggtcatcatgggcggcgccgtgccagcccgggcgggatatgccaaggtcggcgggaatcccatgctctgctgcgaaggcctctttgcgtcggcccttgttttggtcctgtctatcagaggcacctacctggcttcgccctttgtgtccccacacggacgacatgctgttctcagtgccgctgtttgtagacatgagagatgagctgggacgggaggatataaggagcaggtaacctccaggttcggagtttttggttcctcatcctcacactcacatcaaccactccagtctttccttcaagacccaccttcctttctaattgcctggtgcaatcatcttactctcacactcctttgagataccatcttcattcctttctaggaccaagtttcgttgaccgcacttgtcctgtcattccttgtttggatactctagtatcagccagctctgcgctaccaacccagcaccacaccgataccaaccatcaaaatgttcttcaccaagtctgtccttgccgtcggtggccttgccactctttcccaggctcacatgctcctccgaacccccgtcccctacaccagccctgctcttgtccaggatcctctcgaccctacgggcgccaacttcccctgccaggcccgcgccggtgcccagttcgtcggtaccgctacccccatggagaaggggtcgactcagatcatggccttcaccggctctgctgtccacggtggtggctcttgccaggtttccatcacctatgacaacccgcccaccgccgcctctgtctggaaggtcctccactcgatccagggtggctgccctgcccgcaaccaagctggcaacattcttcccgacaacgctgcgctcgagggtgtggacaactacgaatacaccatccccgctgacatcccaacgggcaacgccaccattgcttggacctgggtcaacaaggtcggcaaccgtgagttctacatgaactgcgcccctgtcagcatcgagggtcccgagggcagcgaagatgctcttgctgctctccccgacatgttcacggccaacattggtggcgactgcaccactgtcggagccgatagcaaggatatcctgttccccaaccctggcagctccgttgagaccaacggcgatgtgtctgccatggttccccctactggcaactgcggtggtggtgctgctgctcgcgccgtccgtggtcgtcgcgctgccaagttcgctgcttgagcaactcgcatagttatcttgctaggcagttcttggtagctgcggccgttcgtttctcacatatcagtttcagtaccattcataaggggttcagtcgtttcagcattgtcaggggcgcatattcgttgcatacatcagcatcagcatcagcatcagcatcatcagcatcagcacggggttacgggagtttacacccctagcattcatttacaaagcatttgggaaagagatcaaatcatgatttatacgacaatcgttcacgacacaacacaatcattcaaggccacaaattcgctactgttcgaaagacacgctcgctacgaatcatctttcagtacattcgcttacacacacggcggtgtcacacattgataccagacactcacttggacatacatacatattacgaagaacattttcacgaagactatagacaatcgtttttgcattattggattggtatgggataaggttaactatcttggctggtggtaataatgggtaataaggcctagcttctgctagtttccattcattcttgtttatgagggttgagaaccagaaaactactagagtggttgatggcgaggaccaaaacattcctttaagagaaatagtaatatacactacacaattattatattgtaatgacaagatcctgttgaagcatttatggttgttgactacctgggctccggagttgccaagtcaggtcaaagtgatatcattccaatatgtcccgggatgatccaagactttggggaaggtgactgcgggggactgtgcttaatcgataagataagatctcccagtgccacggtacgtacctgccccactagtcatgaggcttggcatggggcaaacagccactcagcttctagaacgcccctccatattctccggaagattgatggtgcggagcctagcgtactttgatttcgcggccgcatcccccagcttcgcgacggcctgggatttttcgattgacacgcgcagcagcaggaagcgtggagcgcagccttccatcagttaattcacttgtcactttctgactttcaagataccccttccttcgtcttaaactttacacttcccacccaacgccgggaatactttttaatagtcacgacccctccgcctctgcagagatttcacaaagtctagtagtttgcggctgtttattaatttcactgcgctgatggagatgcaaaagtgagtcttctcaaatgcgacaaacttgaagcttcccagagcttcttccagttcgaccatcaggcgcctcacccacaaccaacccacacacctaaacgaggttgctcctacccatcgcacagcggaggactaatcgcccgcatagatagttaacagccgtcaatatcaaacttcaattactattatcgaccgtgctgcgcattgaccgggttgtcgacttgtgacctgccgaggaggtgaatgtcgcagccatggcgagcgggaccttcgaagacattgtgcggaagctcagtgtccctgacatcggtaaggctgcctacttatcatgccgttgcattggtgcagtccaagctgacctgagcgtgtttggcagagcttcgggtcaaggtcgaagcagcaacggccctgcgcgaccagctcgaacactataccactggccaggtctacccgaatttcctgaagcgattgatgcccgccttcatcatcattctccgatcaccatgcatcttccaagcgaacacgcctgagcaggcgaacgcccagagactgcgcaactgcgtgctagaaatcctccaccgtcttccgacccagccgtcaccacccgagcccttcgcgccgtatgccgaagaagtcgtcgatctcttaatgaccctggtccgaaccgataacgaggacaatgccataatatgcatcaagaccatctcggatatcatgcgccatcaacatgcggtgctcggttcaaaagtacagaccttcctgagcttgatccaggatctgtttgagcaattggatagagtggtgagggaacagatcgacaacacgtcgtctaccggtccaccaggtgcaccgtctacccccggtagtacgcaggctgcctttccgccgcatcaacagtcgccgagaccaggatctccagtcgctactggtggtcctcccgatttcaatgccgatgctaatcagcagtccaacaggccgctactcaagggcatgcaatctttcaaagtcctgtccgaatgtcccattattgttgtgtcgatattccaggtctacaggaacacggttgcgcaaaacgtcaaggcctttgtacccttgatcaagtctgccctgagctgccaagcgaaagctcaggatcaagcacacaaagatgccgcggcgcgagggaccatccacacaggtgtcagcccaaacattaagaatcgggccgcctttggagacttcatcaccgcccaggtgaagaccatgagttttctggcctacctgctgagacagtactcgcaacaactcacagactttctgccctctctaccagacatcgtcgttcgcctgctcaaggactgtccgagggaaaagtctagcgcgcggaaagaattgctggtggccatccggcacattatcaacttcaatttccggaaaatcttcctgcccaagatcgacgaattgttggaagagcgaacgctgattggagatggccttactgtccatgagaccatgagacctctagcgtacagtatgctggctgaccttatccatcacgttcgagagagcctcacgccagaacaaatccgcaagacagtggaagtgtacactcgcaatctgcaggataatttcccgggcaccagcttccagaccatgagcgcgaagcttctcctcaacatggctgagtgtatagcacgcttgccaaacaaggtggacgcgaggcattatctcatcatgattctgaacgccatcggcgacaagttcgctgccatgaacaggcaatatcacaatgcggtcaagttgtccaagctatacgccctgcaaacggctggcctctttcccgagacatatttggccgacaagaagcacccgccagagtgggacgaaatcgacattttcactgcgatgcccattaagacaacaaaccctcgcgacagggctgcggatccggtggtcgacaacaaatttctgttcaagaacctgatgaacgggctcaagaataccgtctaccagctgaagagttgcaatccacagggcagtgttgacttgacaggtgcccctcatccatgggcagaagttgcccatggatttactgccgaggaggtcaaggtcattatcaagctgttccgcgaaggcgcctacgttttcagatactacgaaatcgagaagccggtcaccgagtcgctgtacagctccccagtagagttcatggcgaatttctacatggtttctagtggaaaggaggaaaaggacctcttggagacttttgcgacggttttccactgcattgatgccgctactttccacgaggttttccaacaggaaattccacgactttatgaaatgatgcacgagcacacggcgctcctgcacattccccagttcttcctggccagcgaggccacttccccaagcttctgcggcatgcttctgcgctttcttatggagcggatcgaagatgttggctcggccgacatcaagaagtcggccattcttctgcgactcttcaaactggccttcatggcggttaccctgttcgcctcgtccaacgagcaggttctgctacctcatgtggtggatatcgtgaccaagtccattgagctgtcgaccaaggcggaggaaccgatgaattatttcttcctgcttcgctccttgttcagaagcattggaggtggcaaattcgagcatctctacaagcagatattgccgctgttggaaatgctgctggatgtgctgaacaacctcctgctggctgcccgcaagccatccgagcgcgatctctacgtcgagctttgtcttacggtgcccgcaaggctgagcaacctcctacctcacttgagttacctgatgcgccctctggtagtagcgcttcgggcaggtacagacttggtgggacaaggtcttcggacactggagctctgcgttgacaacctcacggctgactacctagatcccattatggcacccgttatcgatgatctcatgaccgccttgtttgatcacctcaagccgcacccttacagtcacttccacgcccacaccacgctgagaattctcggaaagcttggaggtcgcaacaggaagttcatgaccgacgcgctgcctgtgacgtttgagcaatacgtcgatgatcgtgccagctttgacgtgagattgattgggtcgaagagagacagagctttcccagcccatctcggaattgacctggctgttcagaaattgatggaaacgccaaagcctgggaaaggcctgtcaagtgttgcggccaaacaatatgatgcctactacaagaagcaggccttgagtctcatcacggcccaggtgaagctccgcatcgggtttgacaaccttccggatgatcttccccgtctggtacggctccaggcgcaggacttggtgaaacgcaacagggctgtcgatatttctgcctttgaaaccaccgatcgggagcgatcaattgtcaagaagaacgaggaagaggcgctgctgaagcggctcatcaaggcgcttgtgtttgccgagtctatcccagccttcaagtcggaggtggatggctttctcatgaatcttgctcggcatttcaccattgtcgaggtcggacgagcactggttgacatgaagagattggtcagcccgtttgaccacaaagcgggcgagggacctctgttccttgaatctcgggtgttttccgacgcaattctggactcgcttgcatcagagaaccccgagatcagagaagcagccgagcgtatgattaaggaggtgtacaattcggccctcaccatcttcaacgacgccaaaaatgtttcgcgtcttgccttcttcaacaccttggcgtctgccttttgccatggatgctatgaggaggagtggttcaccaagaccggaggcacgctggggatcaagtacctgctcaatgacattgatctcggagatcaatgggttgtgtcgaagcagatggacttggtacgtgctttaatgtacgtcatcaaggatatgcctcaggatctgtcagagaagaccagaagatcggcgcaggtcactcttgagatgctcctgactagactcaccaaagggatcaaaaagtcagactgcttccatcaacagccaccaactcctgctgcaggacaacaaccacagccaccgacaccccagtcgcaggtcaacccaaagtttgctcgcattcccaatatcattgtgatgctgaatggggagctgtcccacatgaaccgccatgtgcgtgagacggcacgccgttccctcgagttgatcgccaaagctgctggcgccgaggtgtgggagttgcttgagccaaacaaggcacagttgctgcggccgattttcaacaagcctctgcgtgcgcttccattcgctattcagatcggctttgtggatgccgtctcctactacatgtctctcaagaaggatttcgtcccctttgacagcgatctcaacagactgcttatggagtctctggctctggctgatgccagtgatgattcgctcgctcagaaggccctcgagttcaggacacagcacttcattgtgaatctccgtgtctcttgcatcaagattctcagcagcgccatgagcttcgatgagtttgggcaagggcagaataacccgacgaggggcaaggttgtcggcgtgtttttcaagtgcctctactcggactctcagcctacgatcgaggcagccaacaatgctttgaggtctgtcctccagcatacgaccaagcttcccaaagatctgctccagtcggggcttcggcctgttctcgctagtcttcaggacgccaagcgattgactgtccatagtttggagaatcttgcccggttgcttagactcttgacgacttatttcaaggtcgagatcggttcccgtctgctggatcacatcaagcagatcgccgatccggccttcctgcaggaggcatcctttacctttttcgagcaacagcagtcgatgaaggtcattgctgccgtgttcaacatcttccacttgctgccggatgctgccaggcacttcaaggagcgggttgttgacaacgtccttgacctggaagagaagctgagacggactcatctcagccctttccgtgtgccgctttaccgctacctcaacaagtatgctacggatgtttgggccatgtttattggcaagttggacgagctgaaatatggccggttcatgtcccaggctctccgacacccagacagccaggagctccgggcgtggggtgctgcgaatgtggacaccatcatgaaaaggtgcatcacggctggccagcagaacaaggacaacaagttcgttgccattgtcaacactatcaacctgctggatgctctctgtcagttccccagctccaacctcatgtactggttggacggcaaggagcgcatcgactggctcaagcaggtcggcaaggagcttgaacgcagtttgaagaacaactccttgccaccatacctgcgcctgccagctgatcaagcatctgaacagctcatgagcatcctcaccaaggctctggagcgcaagcctgaggacttggagccattgctcagcttgatcgagtctgtcactgccgatgacttccgcgagacgcaggttctgctctcgcacatttacaagcacatcatctgcagcaacagtatcgatttctggagagcggtggtgctgcggtgtcttgacatctatgcggggagaacggcctctcagcggacgaaatggtatctcatccacaacattgtcaacccgattctcgcgatggacgtcatgcgccactggcctaacaagaccactggcccaaagttcctggacaagtccgtaattgactcgatcaacaccaagatctggagggcgaatccaacgggcccccatgacgacctttctcagccccgcatcgatcacacgagaatggaggtactgcagctttcggcgatgctcgtcaagtatcacagtgggatgcttgaatcttttaggaaagacttcatcaagtttggctggacctacatccgtctggatgatgttatcaacaagcatgcggcgtatgtggtaataggttacttcatcgcccattacgaaacacccgtcaagatcgtgacccagatttactcgtctttgctaaagacaaaccagaacgaggggcggtccctcgtcacgcaggcattggagttgatggcacctgttatgcccaagcattgcgcggtcagtccaggtgatcgaaacccgccttgggctatggcaccccgccggattttggccgaggagagccagaacgcacagcagatcgcttgcattttccagtttttggtccggcatccgaccctgttctacgattcccgtgataagttcgccatggtcattattcagtgtctccgcaaggtcgcgtctcctccgaacccatccaacgaaagcaagaagcttgcgttgaacatgatgtggctcatctgggagtgggagaagcaaagggtggaagggaagcccaccgagccacctcgtgccttgtccgagtcaccaaatacgaagaagcggaggcttgaggacgccacaggctcttctccttcggccactagacagccggagcgtggtgaataccagattcctgcgttggcccgtcagaagatgatcaagtatctggtggagttcattgctcagctcaatgagcgttacccgcttccctctgcaaggccgcatgccgccgcgacaccatctcttcccgcaccggctccgccttcgactgatctgtgctgcaaggccctgaccctgctttacaaccttttgcagcctcagtactggggagatctcgaagtagacttgttccccaacgtcactgatctcgttcttgtcagcgacaaggctgtggctgttctcacggcggagccatccggggacaaggaaagtcccaaatttgacgacaagttcaccaccaacatcatcaatactctgcaggttgttcggaccatcctcaatttcaagtctgatgactggatccagaagaacatgacccagatccagcggattctggagaagtgtctcaagtgcgaaaaccctgagatccaggactgcttgcattatgacgacggggggtatcacggtgacctggacatcaagccgatcgtcaagcgcattcttgatgccgttcccgaagacgtccccatggaggatgccgatgctgatggcgagaccgaggcgcagacttccgagattatcactttcttgtccaacattgctactgaaagcatgaatgctggcaactacgtttctggtatcaatatcctatggtctcttgggcgccgcaggcctgagtcgatcgaccagcacatacctgccatcatgaagtcgttgcaggcaaagctggccagggaccatgtctctcattatgcttttgtggcccaaacaaccaccggaacgcgcccagcggacggccaaagcagcgcaactgagatgaagccgtacgatcttcaagtccagacgtgcctcattctcaaggctatcgaggttactgccttgcggatggacatccttggagacaaccgccgcccttttctaagtgtgttggcgacccttgtggagaagtcgttgcatgtcgagctgtgtgagaagatcctggagatggttgagggctgggtgttccgctccgagggtacatggccgtccttgaaggagaaaacggccgtgttgcacaagatggtcacttttgagcatcgccaagatccgaaactgctgatgaagtttttggacctcgtcattcgcatctatgaggatcccaagatcacgcggacggagctcacggtgcgtttggaacatgcgttccttattggcacaagagctcaggatgtcgagatgcgcaacaagttcatgtccatctttgacaagagcttgtccaagacagcgagcactcgactggcgtatgtcatcctgaaccagaactgggagacgctgggcgagtcatactggttggcccaggcatcacagcttctacttggtggtgtcgacatgaaccccacgattcagcttcagagcgacgacttccgaacgctgccactttcggctcttgctggtgtttatgccaaggattctcgcgagccagagctgattcctgatgacaagtatgaggctttcatggcgggccatcgccggttcatttcggagattggtgacgtgagggtccgtgatgttcttgagcccatcactcagttgcagcacatcgatcccaagctttccgaccagctttgggtggctttgtttcccatgttctggtctgccacagccaaggaggaccgggctgatctcgagcgcggaatggtgactctcctgaccaaggattaccactcccgccagattgacaagagaccaaatgtggtccagtctcttatgaatgccgcggttcgcacttggcctgactgcaagatcccgcctcatgtgctcaagttcacggccaagacatatgatgcgtggtacacggccctgtatcagctggagaaggctgccatcaagcccgagatcgactcggtggctgttcgggagagcaacctggacgctctggttgagctttatgcttcgcttggggaggaagatttgttttatggcacctggcgtaggcgttgccagtttgtggaaagcaatgccgccttgtcgtatgagcagcatggcatgtgggagaaggctcagcgcatgtatgaaaacgcgcaaatcaaggctaggacaggtgtcgtgccgttttcggagtcggagtacatgctgtgggaggaccagtgggtgatttgcgcgcagaagcttcaacagtgggacgtcctccaggactttgccaagcacgagaacttccaggaccttgtgcttgagtgcgcttggcggagtcaggagtattggcagaacgccgagaacagggagggtcttgacacgataattgcgggtgtcatggacgcgccgacaccaagacgcgcgttcttcagggcgtttatgtcgctgatcaagttttaccacaagcaggagagtttgcaagacttcaaccgtcatgtcgacgaggccattcaactgtcaatccgcaagtggcatcagcttcctgagcgtctcacggctgcgcatatcccggttctgcaaaacttccagcagctcgtcgagctgcacgatgctagcatcatctgcacgagccttgccaacaccacccagcagaaccttgatgtcaagtcgggcgagctcaagctgctactcacgacgtggcgcgatcgcctgccaaatacatgggacgatattgtggcctggcatgatctggtaacttggagacagcacatctttgggctgatcaacaacacctatcttcagctggttcccgcgcagggacagaatgctggtggcgcttcgtatgcctaccgtggatatcacgagacggcatggattatcaaccgctttgctcacgtcgcgcgaaagcacgccttgccggatgtctgcgtgactcaactcacgcggatctacacgctccccaacattgaaatccaggaagccttcctcaagctccgtgagcaggccaagtgccattatcagaacgccgatgagcttaccaacggtttggacgtgatcaacaacaccaacctcaactacttcaacacgacacaaaaggccgagttttacactctcaagggcatgttccaggagaagcttggccagaaggaggaggccgacggctcctacggcacggcgttgtactatgacatcaccgcagccaaggcgtgggccgaatggggctacttcaacgaccgaaagttcaaggacaacccggcagacttgagcacggcgaagcaggctgtgacgagctatctgcaggctgcttccagctacaagaactacaagtctcggaagctggtcgctcggattctctggcttctcagcctggatgatgccaatggcaccattgccggagggtttgatgatttcaagggggatattcacgtctggtggtggatcacgtttgtgccgcagcttctcaatggcatctcgcacaaagaggcgccgagggtgtttgccattctcatcaagattgccaagacgttccctcaggcgctttacttccagcttcgcaccagcaaggaagattatcttgccatcaagaaggcgcaggagaacaaggctcgacagcgcagtcagcaagctgctgctgctgctgccaacaagcctaacgggtcaccagcggttgccaagcaggaagcaggagctgccggggcgaagacagagggagctgatgggtcgagacctgccacggcgaacggcgatgccaaccaggtcaagactgagcctaaggaggccggcaatcccaacaatgctgctcctgtgccggccgagcagcaagcaggtcacaagaagcagccctgggagctcactgaggatatcatgagcgtgctcaagactgcgttccctctgctggctctgtcgatggagacaatggtggatatgattcagaagcacttcaagtgcccgcctgatgatgatgcgtaccgcttgattgtggccttgttcaacgacagcctgtcgtatgtgagccggtcgccacagctgtacgccagagaggtcaagcttccccaggcaaccgagtccaacattatcaaatttgcggagacgatactcccagctcacatccgaagctccttcgaggccgactttgtgagagttaaacccaccatgtatgagtacattcacaaactgaggaagtggcgcgacaagttcgaagagaagctggaccgccgccagacaccgcagccactggagtcgtttgcgcattactctccgcacctcagcgagttccggtaccaaaagtttgacgatgtcgaggtcccgggacaatacctccagcacaaggacaagaaccaggacttcatacggatcgagcggttcttgcccaacgtcgaccttgtgcgcaacacgggttccacgcaccgccgtctcaagattcgtggccatgacggaagcatgcatgcgtttatggttcagcatcctgcccatcgccagtgccgtcgtgaggagcgcgtcttgcaactgttccgtcaactcaaccagacactagccagcaagaaggagagccgtcgccgcgatctgcagttcacgttgccgttgatgattccgattgcgccaacattccgtctagttcaggaggacacttcttggatctcgctccaggccatctacgaggaccactgccgtcggaacagtatttccaaggacgagcccatcatgtacaccatggaaaagcttagagcgctcatggacaacaagggaggtgtaagtttttcccgctccggccccccgggacattctggaccagcccaccctaaccaggccctgactccgcagcagaaacaagagcagttgaatacggctcgtctggaggtgatgcgtgcgattcaggaaaagtatgtcgaccacaccatcgcgttggagtacttccagctggcctaccccgacttttccgagttttggctgttccgtcgccggtttgcctaccagctggcggcgctgacgtttatgacgtacacgcttcacatcgacaagcgataccccaacaagtttaacatttccagaaagacgggcaacatctggggctccgagctcctttcgcagattgcccaaaaccgaccaatcttttaccactcggagcacgtacctttccggctgacacccaacatgcagacgttgatgggccccctggcgacggaggggatctttgccgcgtccatcatggcgattgcgcggtgcctgacggagccgcagttccagctggagcatgccctgacgctgtatgtgagggacgagatgatgttttggttcacgtctaacaggacgacgggcctgacggagactcagctgcgggagacggtgcaggcgaactgcgatattgtggtcaagaaagcggtttcgttggcgcaggctccggcggcgaacctgccggcgcatcagacggttattgacttgattagcaaggcggttaatccggttagtttggcagttacgctggatccgttgtggatgccttggttgtgagggggggaagggggaaggtgtatgatatggggggtgatttggtgatggatgggcacgagaatgaataacatggtgattttatttaagggggttatgggagtgagcgtttgcatttgttatatggatgggttgatcacagcgaaggatttgtcatggtttatatatgggtctgggagaagcaggaaaagatgggattatgtgacggggtgtgggattagatttgaggtttatggggtgtttgataccaataatgccatgtttttgtttacacttttgctgaccctgagagtttattgatgtttgagtgtggcaagtgaaatatggcccgtgcacccttccaagacctcacctgagttcgcgaccccgccaaatcgcgtcgggtctttcttggcagccgcgtcccccaggtcgatcacagttgcgccttgcaaaatattgacatttggtcgcaaggtggattcctggaagggacgtggtcgacaattgggcaggtttgcttgaccattcgaacaaaaccgtatttgctcaatctcatgtcgacatccaccttggttcatttccaacacccaaactgccaccaacaccaacccatgaaccatcatcaccaccaccaccaccaccaccaccacccgccctcatcagcatggcaacaaccgcgcaccaatcctcctcctccaacaactccaacatggagaaattcctccgctcctggcggcaggacgccatgaacaaagcccagtacgattccgcgatttttattggggaccaattactagccataacgagtccgttcacctcttgccctcctccccccaccgtcactaactgtgtcaaaacagcacacgacaacgacgccttcnnnnnnnnnnnnnnnnnnnnnnnnnnnnnnnnnnnnnnnnnnnnatgggaaagtaaagtcgagattgcggatccatgatgggcagcaggaagaagaagaagatgaagggcggacaacacgaaaatacgaagcggccatgtgtcacctccgcgggttatgtttgcaaaacaaaacgcctttgaccgtgcaaaggaggcttacaaggatgcgctgaggattgatgtgcagtgctatgaggcgtttagtcagctggtgaagaataacctcatgtctcccgatgaggaggatgagtttatgagcttgttggattttgggtctgtcggctcggagaggggggaggaagagccgggtgattacacgcacatgctctaccagacgcagctgtccaagtatcgacacccgatggcgtttaatactgctgtggagagcttaactactcattacggcttggaaggaaacgcggacatcatgcttgcgagggcggaccagctgtacacgcagtgcaggtttaaggacgcgcttgcggtgacggagcgggtgctggagggggatcggttcaactttggggtgtacccgatccatctggcgtgcttgtatgagctgaagcggacgaatgtcttgttcctcatcgcgcacgagctggcggatagttacccagaggaaccggcttcgtggctggcggtggggatatactactttgcgactggcaagattgccgaggcgaggaggtatttcagcaaggccagcatgatggaccccaactttgggccggcctggatcgggtttgcgcacacgtttgctgccgagggggagcacgaccaggcggtgacggcgtacagcaccgcggcgaggctgtttacgggcacgcacctgccgcaggtgtttttggggatgcagaatcatgccatgaacaacatgacggcggcggaggagtttttgaggacggggtatgggctttgtagggaggatccgctgttgctgaacgagatgggcattgtgtgttatcatcaggaccgggcgaaggaggcggcggcgttttttagggaggcgttacgggtggcggaggagacggagattgagagtggggcttggtttccagcacactggcggcccgttactagtggatcnnnnnnnnnnnnnnnnnnnnnnnnnnnnnnnnnnnnnnnnnnnnnnnnnnnnnnnnnnnnnnnnnnnnnnnnnnnnnnnnnnnnnnnnnnnnnnnnnnnnnnnnnnggttggttggtgtttcctgggaaggaagggggagttggtgttggaggatgggaaggcgggggaggggaaagaggagatggataggttggaggaggttatcgagcagaggaaaaaggcggcaagagagagggttgccggcagggggcgaaatggggggtcgcttgacaaggggaaagggggttgctggacgggggggcggcatgagaacaggtctggcgaggggtcaagggccgtggaatgccggagacatggacatgagtgaagaggagtaggagggcctctttcgcgaagaggatgtggacgtttgagaagtgtacgtaatcggacgacgacatgatggacactgttttgtgtacctttctgcactacattagcgatggcgttgggttatcaataaggctgaattaagcatgggctggcggtttggtatggtatggcataaaagaggtcaaggattgcggtatgataactagtcattatagaggatctggggtattcatccgtccttgttcttgtattcgtccatgtttcgaggtcaaagcttctcctttggcccgaccagctcctccaccttggcgaactgatagtaaaagtccagactctgggggttggcgagggtcccgcttgctttgatggtctggccggagacgatctgcttgacgggaagctcgacctttttgagattgatggtggtctgtcatgtgtcagtgccgggatctcgcggggggaaaaaggatgaaagggagaagcctaccgggatttctggcgtctcaaagatgtacttgggcacatgcctcttgctcaggtcgtctgaaatcttcttcctcaactcatttaccaactcccttgtgaacttgtggcccggcttcatcaacaggaaaagcatgacgctctcatcggcatcttgcttcctcctctgccccacgcagagggagtcctggatcttgtcggcaaaccacctctcgacaacgccgtagatttctgctgagccgaatctgacaccggaggggttgagcacaccgtctgctctgccgaggaaggagatgtttcctgtgacggggtggatgacgcagaaatcaccatgggcccaaaccccggggaagcggttgaagtaggagctgtggtactttgaccccgggctggcaaccgggagcttgtcgccccagaaggcgcaaggaatgttggggaagggtttgacggcgacgagctcgccaggcgtgccgtgggggacttcaactcctggctctccgtctggaagaagggagtcgtaaatggcaacgtgtacgcccagagatggcccctgcgtccctccaacgtagacgggcgtcagtgggttcatgatgccaaagcacccagcaatgtcagtgccgccagagatattccccaactggacatgcttgggaaagccaacatcatagaaccactcaaacagctgatccgacaagaccatcccggtgcacgacaccgtctccaacgaactcaaatccgccatctccctcggtgagatgccggccttggccaactcaaacatccacctcggggaaatgcccagctttgtcgccttgtgcttcgcagccagttccaccaatatcttcgcatccggctggaaaggcgacccatcatagaatatcgccttccccccaaacaacaacgacccaacattcgccagatacatgatccaccccgtcgtggtatactgcaacgtaacactgtccggcccaatctgctcgtgcagcctcccctccttgaaataattaatcaatatccccccaaccgagtgcacaatcgcctttggcgtccccgtcgtcccgctgctatagcaaaccaacaacggctcacaaaacccaaccctcacaaaccccggcggtgtcggattcctccccgccgcaccaacaaactcatccagcgtcatcgccctcggaaccttcctcacatccctcgcctcctcaaacctcctgatcgccaccacccccttgaaattcttgcagttacccaacccagccacaacctcccccatcttcccccgcaagtccaccaccctgccattgtacaaagcagcatcatccataaacacccaaaccggatcaacctgctccgccctctgcaggatccccttcacccccatatccgtcgaactactactaaacaccgcgcccacccacgtggtagccagataaacaagcagcgtctcgatagaattagcccccacaataacgaccctatcccccttcttcaccccccgtttcagcatcgcggccgccaacctccccgcttctttcctaacttccccgtacgtcacctcccttgtctctgatcccccctccctgatctccacaacagcgaccttgtcgtcttctttatgtctggttgattgctgcccgtttctggggtcacgggagaagagcatgttctctgcgaaattgaggcagacaccttcaaaccagacggggacttggtcgattgtggctgtttcgtccaccacggtggtgtacgaccccgagtagaggtagtctgaggcctcgaaaaccgcagaccagaagagggaccgttgggagagggagaactggtggaggtcggagaaggacgacagggagaggttgtgttggcggttgagggagcgcatgaagcggtgcatgagggttgtttccggggcggggtgctcccagagcttgcgggggatggggtgtggtgtggtcattgtgaaggatgagtgttgctgtgtgtgagttgtgaaagtgatgctgagactgagactggtactggtggtgtaagtgatatatactgtctcaaagattgcggtgagaaaaggaagccaccaagtgttgacaggatcgactggcgacaccggacctccgcggtgcaggtccacggctcacgacttataagaacacggaccgaggcagacgcacagtagcacgatgcggggttggcgggaaaccaatgccgcgcgcgtcccaacagctcgggtgcgccgttccgtctcggctcggctgccggcccaaatcgtacatccatctttatcttttgtttgtttctgtaccataacaaaataacaatacacacccaaaccccaaaactcacttcctaaatatatactcatcaaacatcaacacattacattacttttgcccactccccactccccattcccaaccctaacccctaacccctagtcccttcccttgcccttgccctttccatgtctctttccggcaccctcagtcacgtttctcccatgtgccaaccccaagcagttggcaatcttgtaaaacacatcaatgttgctgtaagtgccgccaaatgtctcctggcacggaccccgagcgtacacaggcacgtcagtgagcgagtgcacgccctggctctcgctggtcggaagggtgccgttgacgacaaagccattgggcctatccttgtcgttcacataagcctcgccacctctcgaagtggtgggagcacgaggggtggcaccgattccgaaatcttcacgacgatcgggagcggcaccgacgccagcagcgaggacgtagcgggggtccctgttgagaagtgccgttagtcatattgctaacccagacagacaaagattgatacataccagttcatggggaagttggcaccagtgccatagctaacaccaggcttgggctccgtgtactgcgacaagccagagttctggtaaactccaatggcattcctcttgctgcgttcgtcctcctgggcctcggcatacttggtgtccgagctgccaaagacatctgttcttgttgtcagcacttgtcatcagcttgagttcattgagaggagcataccgaaaccatgaccgtggtcggcagacacaacgatcagagtatcatccaagatcctcaacttcttgagcttctcgatagtggcgcgaatggtatcatccatctccaaaagatcacccagggcacggtcatagtccagcgcgtgcatctgcttgtcaatgctagccgcctccgacatgaggaagaagccctccttgccgccacggttgtgcaggatatcaacagccttgagcgtcatctccttcagaccgggcaggtccttcgcaggcttggcggcgccagtggggtcgttgttgatctcaaggttctcggggaagatgtgcctatcgatccagaccggaagattgttcttgcagaagatgcccagagccttcttgtcattgggggcagacaagagggaagtcttgttcaagctgacgctgtagcccttcttggcaaactcggcatagtagtccttgccctggtaagaccctgggccagcaatgaactggtcggcaccgccaccaaagtaggcatcggggccgtcggtcttggtccacgagtagttctgcacgccgttgagggtctggtcgatgaggacgccatactgggagcggagacgggagtggcctgagagggcaatcggcgtggcgtcggcaatgaaggcagtcgagacggcgccccacgcggagccccagatgcggaacaacatctcgacgatggtctcgaccttggggtcatcttgaggatcgggggaggtgtcggcatagacactgaaagccacagtaagcatcaaagcatcaacggttcaagacaaaacttacccgagggcattgacagtgctcttgtgaccggtgtacaaggccgaggcggagtttgccgaatcagtgatgaaggtgtcgatcgagtgtgtctactaggcattagtatcgctgtatcctcgccgactggcgccatgtcatgaacgtaccatttggtgtcccagaaccgggaaatcgtcgagcgagagcaaggtctgatacttgccgttgaccgtcttgtgtgcaagcaggcgggcggccgtaatcatgttggtcgtcatgccgtcgccaatgaagaagatgacgttcttggccttcttcttggtagccaaaggacgaacagtccattccgccgtagtcttcttgcccgaaaagtagttgagcgtcaccgtgtaggttccaggctcgtacagcgccacacgacggtacgccttggaagcgacattgaccacagagggggtctttgcgtcctctgcgaacaagtcctcgaaccaagagaaagtccacttctcaagcgagggctcagagcggatcttgaagaagtcggcgatgcttcgcggacgtccaccatctttcgagatggtcgccgtgaacttctcgtcggggacaccattgttgaatgcctcggatccgttcttgggggcgtgaacctcgaaacgaatgtcgaactcctggccaggcaagaaatcttgctggtctggcgggatcacgcagcccagcgaagggcaggtgccgaatctgcggtaggtctgggccgaagcaacagaagccgtggctgccagccaaacggcggcgaggtccagtcttgggagcattgtgagggtgccttgtccgggtggctgttgacttgagttgaagctacctcacgcgagctctcaatgtcgttgatgtcggggcggcagcaagcttatatataccccgaccttgatttctgcagtgggacgctgatcgacatgcaatcacattgcaccgacgacggcagcatgcgaggggggccgtcttcctgctgcttccctttccacactgacggatccggactcctccctgggtaagatgggggcatcaagaaaggaatacaagggcatcgtgaacgtcatggcgagtcgtttccaacacgtggcgtgggtcgcgtaagtggtggtcctcaccccatgtccaaagaaaacaataaaatgccacggctcggagatgcttccagtgccgtgataactgtcccgccctcgcgcggggtgtgtatgtcgaaaccatgtgcgtcatgtcgagctctgcgtgggcggtctttcgatgtaacttgatgccaagatttcgatgttccaccgccaacgtggttgcgattcgagctctgattggcgacgacttataccgataaccatccatgccaggaacatggccaacccacccaccgtaggccgtactccgttacattctcctcctcgttgcgcttggctctgttgtgcgtgttcaggaccttctcgatacggggagagtgtcgcacgtggtgaatcgaaaagaatgcccaaaagtccatgcccttcaattttttgccgcttttttcttttcttcaaattttttttccttttggctctctgccttttttcttttcaacttttttttgggtgagaaacaggcctttctggtccctcttgctgaccacgacaaaatgcaaactctccatgatctgcctgtctcaagagtcacagaacagatcaccgtcaccccccgagacttttgagctctagttagcacatccctgtgatgagatgagcgtgtacaatgtggccttgaactttcgcgcttcttccacatcgaacgacaccacgttgctggggtcgcgcttcaaaaaagacgaatgcaacaccatgccaaccgagtgaagactggttagggcatagatatatcccagtcctcccatcccattccccagactttccagggtatcgcttctcacccccccacccacgatcagttcttgtccgatcctcgccgtctcgataagtacttgcttcagagccttggtattgttgctcgcatttccacagccaccgctggtaagaacggccatcccctgtgtttttaaccactccaggtcgtccacccacatctcatccctggaagttgaaatcaccagatcgaaggctcgatggaagacacacttgaaatcatcccctgccaaatgcttcaactccgcagttctcaccctgtcgaccaccagcatctgtgggaccgagcaagattgtctcagaacgccaaacacaaacccatctccccgctctctgctcatgtgcttcgactctttgaacttgcgtatatcagacttcatctgctcgaactcggcatctgaataaacaaagtcgggcccgagcttgggtgctccgcaaggtcgaatcatgattctgacaggcacatcttggagtccggcatggtcaagtgaggcgttgagatgctcgagttcccaggtggatggcgtaaggccattttgctctacatcaactgtagtcaatgcacaaagttccctgctaaagatacagacgtcggatgactacttaccataggatccagttctgttcaattccagtcttgttttgccattgagcttttctccgacagccttcacagcagcaactccatcacggggcccaaaaatggcaacttcgattccgctcatcttggctttggagagctgggaagttgctttgatggtcaagaaggtgtgagatccggataggcctgggttcgaaagcggttgatgtttgggagaagaatttgggcgaggggaatcgattttgaagttccgttggctcaaccaaagtccggacccttccatacccgaactttaattcctcaccggactaagagtgcaccttcctccccgacaagagaggatacgacatccgttatcagaagccacccgacgccaggcagcaccaccggggagtgaggggtaaaagtgtggggaaatacacacatgatgcattgcaatcaaatcgtgcaacacctgacccaagaaacacaaacaacaaacagaatgccaagcgagtgcccctgagcccctgaatcctttgtcaattgagtctttggcaccccggcaaacacttggtccacattgctccctccttcgtttttgaaaaccaacatcttgaatgggctttcctctcaaacagattatccatcttcaagctgccttccactcttcatgaccaccaggaaactttgtccaccagcgtgcgcatatcacgaacaaagctattgcatctcacaaagaccagaaacactaccctaagatatgcctagtggcagttggaggagtgtacttacgccagacggaaattttttaaaccacttccccgctacctctttgatgttgctcgagaacctccccatcatcccccctgcgtttaaactcgagaagcaaaaagtatgtccccggaatcattcgattttcgccagcaccgaggggtttggccagttgtggaagagactgatgaatggtgggctatttggacgaggcccactcaccttcaaacttcttgcgggcgagttcgccgcctgccacctgggtttcaaaaaaatctcagccaaagaaataaaaaatccaagacgagatatttatagaaaaaaaaatataaaaaaataaacaataaaaaaaaaagacaggctcactttcagaaaatacatcatcagcctcccgtctgggtctatggcttcgatataggcggtttggtcccactaactggagctaccagggatgatgtcgaggaacgttgtgcctttgggcgctgcgtcttcgactgcggggtcgatggttcggatccggctatgtttgagcagatgtccgcgtgggatgagccggtgttctgccatgacttttgccatgccgaattctgccatgtcgatcttctgtcacggttggtggttgaagtactgagtgagagcaacgagacctacctagccacctcaggtacctccctagttatactcacagagctgacagcttcttagcggaatcttggtgcacttttgaaacacacgccattctcgtgactagttactctctgtcggatggagagaatgtatgaaagatatgttggctcccaagttatcgatgggtcatacgagctacgcagtggcaaataggtatgcaccctcgtgcctgacgcatgtggaaaatatcctacaaggggggacaacaggagatggaattgaaaaaaaaaatcgaattgatcaattgggaaaaatagaaggtaaagggaaaaaaataccatcaaaaagctcaccgagcagcccacattgggggtgcccagctacgaaaacctgtaaaggttttacttcgccaaaggctcgagcggacaccccttggtactctttagtccttacccaaatcggtgccgcgactcccaatactgctatgccatttggcaggagccgagttgggagtctcattcgatgatcgaaagggcgcgggagttggtatatataccgtgggagcagggagcaagtgctctcggacgacaaccaacaccgaaagagcgttgctcttgacacagggccctgatgttatccagacctagcagttaagaagtattagagtgcctaagctgggtctgtcaatcaggtaggtagccatcagtttcgctccctgtgcaagtcagtcttgaaattccagtcgacatctttccccttcgtctcgattgcgtggcagacatgatagcttctccgcggtgtaaacaataaagacgacacttccgaagaatatttatctatacctgccattaactttgctgggaaatgtccggtgatgctccgtaggctcatcacgagttgacggttctcgcccataccgcatgttacctaagcagccaagcaagcagagaacaaactaatcaaagagagatatcagtgacactgaacagatttcctctcttttctcacatcttcaacatcccaaccgacagcatttgtcgtccaccccgccacctaatcccgagtgaaaagggttagggttgcacatccaactcatccctaagccaagcacgccagggatcatcccctaacaactcccaagtctccaccaacacaaaaaagcgagaaaaaaagttcaaaaagaactcttccttgttggaaggacgcaaaagcttggacgatccgcccaggggtcgaacctggaacctcctgattacttgatcttttggaatcgtagtcagacgcgctgccattacgccagcggaccttgtttttttgttggagactcttcctagaggttgagtttatgatgccgacatggtggcaacagcatatggtcaaatactcccacaatccaatgccacatctatgtaatgatcctactccttatctttatacagctgcagataacttgctttgagcctatcaagaatgtcagcaataagctcgcgaggtaccaacaagagcactcacctcatatgcaaatgctcatcagcagtcaacaccttcctctcggcatacggattcccctgcttcgcctgcgcatccccctcatgattcctaaccctctcactcggcacaggctccaacagcgtcgtccccacagggtggcagaaaaacgcaatcgagtacctcggctcagtatccgtctcaccggccacagacgtcttgcccggaccaggaaacaccaccctgtgaactgtgctcctgagcagcccattagtccagtaagaaagcaaatccccgatgttcaacaggataggaggggaaggatcattctcagtccccggtggcaccacaggaacaggagcccacgtcttcccgtcttgggtcagaatctccagaccagcctgtcccttgaggcggaagagaagggtcatggaaccgtagtcagaatgagcccctgcgcgaacatcctcctcacgatttgcgtcaggggtatcggtgtggggcggatagtagaggaaccggaggatggttcccgaagcgcccctttcgcggacgtgagcgttcttaaagaagtcagggggtgtgacctggagaccgatgccgaggagggtgttgatcttgaggcagaggttgtagcagagctcacggaagtcgttgatctggctttcgtgaggggctatggtgggtggcatgggttggtcggctttgccgttgatgaactcgccaaagttgaaagccctggacctactgtgagtgatgaaagctacgatatattgggaggatactcactctttgaagtcaccgacctgttgcctgtcagtaggaggacggtacatatcatcatgcgacacttacacgctgggttgatggatccaatgtctcatactgcatagcagaccagccgcggttgttcttctgaatagcacatgcctgcttctcttcaagtggtgctttgaagatcttcctgccctatgatggtatggttagataagcttcagactcagctgtaaagaagatggtaccatatcaaatgcgccatgtacagcatcggcaggaatatctttccctgtgttcttgatgtatatgaagccatgttcaatggcggcctccacgagctccttggccacctgctcctgattctcccccgagaggtcaatgacgggaatctttgcaactttgttagccattgaagccgtcgtataccgatcctgatatgtttgtcgaatgtgtcgtgtgttccccgagacaaatgattgttgagttggttgttgagtcagaaaaggagccgcagatcggtcccgacagccaccgaatggtccaacactaagttgcactgatgataaggcagcgaaggatgtcaaatagttggactggatcgtgtgtcacgatggaagccggcacgattcgtagagtcagaaagtaaatggatagtacatagtcttgaattacgtaaacaatattgcgagagctcagttatccctcggcatcaagatagatgataaccgccctctatccatgaatgagatcacatctcccggccgaatgcggccactgtcggggttggagtctatttgcaggaaacgggattcagagacccagttagtgcaacgatatcgggctatcgcgtcgggtggtaaacggtcccgccagctgattcatgtaagcagtagaaagcgatcaaagtgggtccggcagcaccacgtcacccgcgagtttggatcgccaaaacgatagagggcgacctggaagcttggggacgcgatgccttcgggggtgctgcgtgctgtggcaggccaagctgcggcaggcttctgcgcctcttgtctcctgctccaaaatcccatcatcacaaaattcctcatctccaaggctaaattgatttactcccccgagaattcgcgtccatcaccacttgtttttcccattttcctcacatccgaagcaactatcgtcattttggcctgcagccccagccgagcattttgattgtcgtattggtcgcgcagcaattcccacccgcccggcgctcgagccgtgacttcatcttcgagtctctctccctttccctttcttcacctgcgcccccgtcgcacccacaaacccacccgcgaatcatttctcatcccaacgcccgcagccacagttggttgattccgccaaacctttgtcgtcgcagccatggctgcgtcacccagctccgccgtcgccatgtctgaggtcgatgccagttcaccactaccccaacaccaccatcacatggaaaagtccttcatgacggtggtcaccgacgacgacggcgacaccaagatggcgacggctaccccagaaccaaccgagacgcagcctcggggcaagaagcgcgcccgtgatgatggccagaatggcaactctatcatcggcaaagtcaggcatttgaagaagaacgatggagagccgctctggcgcgaagatatccaatacgactttctcaaggccgtcttcaacaacgaagacaaggtcttcaccaacagctacgaaccacaacgtctgggcaagcaatgctttgccgacctctacatcgacacgatggccaggagtagcaagaccagcaaggtccttcgagacaagctgcttagtgatcgcgctgccgccaagggcatggccatggtctgcctcctggtcaacattggtcgtatgaacacgacccttaattgtacgttaccgacattgctctggcgcttgaatcgttgctgaccatcctccctgtcacagttttccccgagatgcgagcccagctccgaacataccacgccattccgtccctccaagcacaagcagattccaacgcatacaagcagctccaggatgcgcccaggttgaagtccatcttgaagggcggtatggaggaccggacagagcccaactctcttgatgccgtcaaggccgtcaacgtgccgagaaccaacccggtcaacttgctgttcctgatctgcagcaacgctactaaggttgctgagctgcacttcccgcccggcggcgagttccacgatctcatcatgaagaagcagttcaccagtgagagccgcgcgagagcctttttgtggatcatgtggttctacctggagtccgacttcaccgaggaaggatgcgaagagaacccgttcggtgccggtgtggactacggtgttgatgtcgccaatcaaggagttccacagctggtgctcatgtcggaagaggaaatggcactcgaaaacgtcgatacagaagaggagaagaggttcggccgagagaagcaggagatgcggcggaagatcatcgaggccgaccaacagttcatggcagaaagccagaccaaacgaggaggtcgagctcgcgccctggctggagaggaagttggtccgagcaccggcatcttaccacggattcgcccttctaagcacgagagcgatcatgatagtgtcaggtcgactccgccgcgtgctttgctcggcaggccatccgttggcgccagcactggacgacgtggtccccactcactgaaatatgtggtcgatggctcgtcgcctgggggccctcagctggaaggaatcgttgctcggaaacctcgaccaccgactgctcaccagatagctgttgagcgcaatagaaatcagcgtgtggagtacatcttggatcgtcgtctccgtaaatcctatcaccaggcacgaaagattcgccgtgttgacggggcgattatccacgctcttcagagactggagcagctggacgatgaagacccatgggaggacagcgaggatgaagacacggtcaagatccacaaggcggccattgaaaacgccggagtcaatgttgatactcaccacttccgggagaggggttacggcgggctgtgtcagctcaagaatgagacagatgactttggcgagcagttccacgcgtacactgctacccttcgacgcgtctcccgacggctcacccgctgggagaacagcgatgatccaaacctgggggttatcgcgccgatcaagcggccaaaggcgacgaatggaacagtcaatggtgatggttccgatggggaaggtgaccagtcaccttccaaggaacctatcgaccccgccgagactgaggacgaggcggagatgatgtccggacgtcagaccaagactgtgcgccgtccaaaggccaacgggctcaacaggggtgacactaatggtgacacgcccatggaggaggccgacgacctggatgatgtggatagggggttgctcggtctgggtgatgaggatgagggtgatggtcagggggatgatgatctggatgatgttgagaagacgcttcttgggttggatggggattcggactcggagtagaaatctgactgtttttaccttgggccgaaacctggggtttttgtcggtttttgcaaaagtaatcaaagaggatagacggagaaaaatgggtggataaacagactaccatacacccaatgcctcctccatttctcatgaactgaggaaaaggggggttgtgtattacatttcttggggaggggaactttttcactaggctttgttcgtcgggatcaaaaaagaatcaaacggagttttggtaaggggatttgcaaggcgtttgggaggggtgggtaaaggagggcagttgcccctcgaaggctgggctggagagggcgcggatgagccatgttgcccatcgacaccccttgaagggcactaggatgggggaatcgggttcttgctttcaggtgtataccacctttccttcatattcagctagccagcgagaagaagaattactgtcgtgatagttgattagtgtggcagaaacaacgtgcatttttgctgtaacctatcttttcaatgtttattcagtgattccactacctgtaccgcaacctaacgaacaactacttcaacattacaatcaactcatccctcattccctcccattcccacccccagccgccgcaggcccaggagcaccaaccaaccacccaaccccactaaccaacgtccccatcgccgcattcttcaactgatccctcttcctcgnnnnnnnnnnnnnnnnnnnnnnnnnnnnnnnnnnnnnnnnnnnnnnnnnnnnnnnnnnnnnnnnnnnnnnnnnnnnnnnnnnnnnnnnnnnnnnnnnnnnnnnnnnnnnnnnnnnnnnnnnnnnnnnnnnnnnnnnnnnnnnnnnnnnnntcaggggctgttagggacctgggcttgattgctacgttccattgaggggtcgttgttatcaatagtaatgtaaaggttgggaggagctgatcatctccatgctgagcatgtttttgagtttctgtgggagttggaggtgggagtcggagttgaaaacagtgaggcagaaagtgtggtacttttaacacctatcgatgggctctctgtatcagaacctttttgttttgcctttttcgtactgttaaacccccccggcatgtttgtgcccgagacactatcccccctccaatcccactcctcctccctctcctcctcctgcctaaccttcacctccagctcctcctccgcccgtcgataaacattcaaaatctcctgcagcgtcgcccccggcgcgatcctcaacgcaacgctcaaacactcaatcctctgctccaagtgcctaatctcttcgttcgcgctcccggtcccaaaatgcgtcggcttggtcgtcctcgccgtgcgccggtacttccccgcctgcagcgccactcgccacgagtaatcatctttttgttggccggtagcaggagaatcgagacgggtgacgacaaaagagtaggctgtctcgaaatcttcttctgttaaagccgcgtcgatgcacatggctgtgatgcgttgagacacctgttctggcgggtgctggagagaggatggatgagaggaaggagattgtttaaccagcccggcttggaccatccggttgcccaggtcgacaaagtcctggagccgggtgtatgatttggggttttgctcgaggattttgccaatgatggagatcggatccgagtgcacccgcaggacaataggggtgaagggttcgccttgtttgaggactagacggtattcacttagggcgtgggtggcttggaggagggcctcgactttttgggcgagggggtgggatttggggagggtggaggggaaggctttgattctgagggaggactattagtatggagaaagtgagaggagttgagaaggcgttggcttacatctcatcacacttcttgagcccaccgcgagtgcggttgggattggaagcgttgtcgtaggccgtcatggcggtggcgtagaccgtgtcttgcagcaccttctcgtccaggggcctgtcaggggcgtcttcgtacaacgaccgcgccaaggagtagcctttcggcagttagtaaagagaagaacagaacctagaagaaacaacctacgtgtgttgaaaagcaacgccttgagaatctcaacctccaaaaactcttttttcagcttgctgaacacccccttaggagtggcctcaagagacacctcctcagcaccccaatcccgaagccagagaatctcatttctcgcccccaaccaaaatttatcgtctgtctttgggccgttgtggttgagatgatgaatcaacttgctggcctgttctttctggtcacgttcgtcttgtaacaaggcgagctctccggctcttctaatggtgcaagcttggccggcatgggtgagaagatgagcactgagaatcagtgcctccaagaaagcgacagcagagttgtcgggcgacgtcaaaatattcgatgaagccaacagatcattccgcataaacgtcgcggttttggtggagatgatgtcctcagatatttgctcggcaaggggcggcaggagtgcgacagctgagggaaaaaggggcagcggatctagaccacggaggttcgcaacctgagccgcgatactatatgccccctcaatcgcctcagatgacgcttccggaagcacataggccgatgccaatgctgcctgcgcataggctcgctgcacacggtcttgctgttgctctgtcaactccagcttcccccagccggccaggtcagcatctcctggaccaccccactgttgaatagcattgacggccaccctccagttctttgatgcttgcgtggtgagccagcgaagaacctcgtcgtatccggcacaaatcccgtcgtcttcctcgccgttgggagaaacgatactacgtctcctggtcttccacttcttttcgtccacaagccatggaccgattagaccccgcaagtctcgtcctactacgggcaagtcctcttccctggctccggtccgagacagtaacagattgacggcaacacgatctggaagttcctgaaaagcagacaaggtgtattgaattggatcctctgggtggtattcgcagtttcgtcgtaaaagcggcaagattgtcgagatcaaaagggtccgcacgtatgccgactgattcatgaacggcagcaacaaggtcgggagctccgcgagcaagccagcctcctcgtccaccttgtatgacctccggacaaggaaggaggtgatagggtcatccccaacctcttttggtgtatccttgaaagtcaagggcagtagtcgaagcttgcgcacccgctttgtcgcatccccctcggctagcgtctctacagatgaagcatcgacgtcatggttggtgttttctgaaagtgttcccttttcgatcttctcgagaaatccgacgtatttgtttgattgtaaggtttcggggaggtatgtcaggagaatgcgcaacaccaggtctttgcgcaggacagtgtcatggcgggcagcaaggacagccaagctatcgatatcggcctgaacagcaaagtgcacggcaaggaggaccagctttgccgctgatagtgagagggtcattattttcgaggctcctgtatccgagattcgtactatcgacctagagaatgaatggaacggtgcaaaatcgcatgtcgaattacgtcggatatgccttcacatggcaacttgtcagtcaacgacaaggacacggagctgagagcttccacaaacagcagttggggatcatgaacacattcgctcttggcatcttcccccaagaaagcggcagggataggggtcagccagccaatcgaaggcagggcatttcgcccgcagtccgtcattgtgggtcatccctgctgtggcttgacctgcaaaagtgtggctgccgctctcccgtgcgtgtgtctgttgctggccaagctccaagtgggaacatcacattgactttggacgccgacgacattcgcgacctcccctcaacttcccctcctgccacaccacaaacagggaaattcatagcccatcatggcgtccggatacggcgtgaacggcggtgggtagcctggacacgtcccaatggcctcaattggccctcacctagcaacatataaactaacaatgccctcgcaggcccgtctcggtgcttccccttctggcaggagctgctctcgtgctacgttgtcaacaccaccgaattcgatgactctggaaaggccaagtgcgccgggcacatggaggactactacgagtgcttgcaccacagaaaggaggttagcgactgccccgagcgccggcgcaaacatcatagggaacctctcgctgatcgagattgtgatacaggctgccagagtcaaggccctgcaggctgcttacagagctgccgaggccaagaagctgaaagagaatcctccgaatgctacgcaaataaggaatctggggctgctagacaaggaggacgacacaaagaaggtgcttggatcgagctagacggggccgatgagagaatagacgtttccgatgtgcatatacaattactggcggtggtttgcaacccggcaatggtgagaaacgaagctgatacattcatgttagtcgagctctggaaaatggtgacttgttcgttgataatgggttgggtttggtttgtgctgcggtagaccaagtgaagcatatcttctgaaccactgagagagctttgtagggctcggatgtaaacaaataccgggagcaactcagcagagcccaggagccagaacctgaagggcagacgcctgtgtctccgcaaaccatgctccgagtggaaacttcacctgcgtgccttccgtcttgtctggtctggcagtgagtgcattcacttctctcaggtttggcccttcctttccagcgactttccttcttctcgaccaggctgtcgaccattttggttcctgcttgcatcttgtttgcgcatccgggaagccttcaggcccacagagtcgccttttctttcgacatttcatttcctccagtcactcgttgatttccttcaagatgcctagcctccgaggcatcgagatttccatctctacgagcccagacgatgaacgaatccccgagtacccgcatccagaaggttcaagatgtccagctcgtagcttctctcagactgttcccgacgatatacccaagagcttggccacgacctttcacccaaccccggctcagtaccacaagtatggcccgtcagtgtctgtctacattccatctgtttctggtgagattttcgatcgaagatggtgcagaggcatccgctaattcggtccaggaacccgtttctcaatcaactatgccgtcaacgctccgccgccttccccttgcaagtttgttttctttcgactctacatgaacgccaggcccatttccgcctgggggattgaaccagctgtcaaggataatggaagggtagtcaagtccctctgggcgccaacatctcgatacatggaccaagtcgggatcgaaagccgcaacttcgtcttcttgccaggccaggagcacaaatctgtggcagaggatggcggtttgattgagatacaagcctttcgcgctaaagcacggcgggctagagctccaaagctggaagaatatcgactccaagacaactatggcatagcgtaagtgtctttgactgcgagttgtcaactctgtcctctaacttcaatgctagggctcccagtgttggtcttgttgaacaacctcaagacatgtgttactacaccttcatattgatggatcccaaggagtcaccctttgcctcgttccgttttcactaccgcacctggagtaacctcgagcagctgaacttgatccccacaaaggagctcgactttctccgaaacatctcgccaaacacaaagcgtgatagcggcccaagtatcgactccaccgagaacggttcatcggaagaggttcggtctcctttggagaattcggatgaggcagtctttgacgacagcgaagaggtggaacaagaaaacgtcttgcgtcgcaaaccctcggtctacgtgctcaacacgccacccgagcggttccaggtttccacatccaaggctgtgctgccccagccgagcaaagcacttagggattgctaccgtgagtcgtatctccagcgccctctgccagaactccccattcaccagctttctggcagaccttcacgacgatcctcggctgcatctgccgtctctgcagtgtcgggagctccctcaataacgccttcgctttgccaacatatcgacgatgactcttttagtttggataacaccgagtttggcgttgcagcgatggcgaagagggttaggtcgcccgagtctgtgaggcagcttgtcacccctgaggcggatgagatagttgatgttggcaacgaagaggagtattcgatttctaattatgaaatgtcgcctctttcgacgaatggatcgatcaccgagtcgaggttgtctcctggggggtattacccgatgacgggaagcaagtttgataatggactggcgagtttttcgccaccgcatcgacaccaagctgcttacccgctcaggcagtataccaggccgccgtcggtgtcgtttttccatcctcagcaggagaatcatcatcagaatattgatcagttgatcactcagcaggagacgctgacgttgacggaggcgcagtggatgagccgcagtccttctcctccacagacgacgcaaggaggagatgatgggagacgacgtgtttggagcccgaaggcggcggagagggttggcagtagggggggccttttttctgggttgaagaagaagaagtttagtgcttcacctaggaagcttgcgcagatggttaggaggagggaggtctctgttggtgataagggggagacggggagtgaagggagtggggagagggttgggaactggatttgatgtgggtgtgagcagatgctggttggggaatagaagttttttttttttttttttttacggaacaggtctttttgggatggtgtttggaatgttgtgttgtattataccctgatgtacggctagtttactgtttggttttcatgaaggaagatatgatatgttacgttgggtgtcttaaagtacatataaggggctgctgatacttttcatgagaggagtaatttgctagattattaccaccatttctcgcacaggaccctgctcttgtctatgcctagaccttgtggggagggagaggtcaggccgtcaacaaattggtcggtcatggagggtacaccgcatatgtagactgccacgtcgtctttgtgctccccgatggcgtttgagacgtcggagagggatatccttctcctttcgaaagggatggataaatgtttggttgttatttcgtttgttgagatgttgtttgtgttgttggggccaccagtggtggtgaggaagagcttgatgttgcctttcagggggtcgttttggttggagaatagattgatgattcggtcgaggaagagggcttgggaggtgtcgcctgattggattttgctgttgggatctttgagagagtagaggagggtgatttcgggttgggggcgggtggtggagatgtgggagaggatgttgattagggggtttatgccaactcctcctgccaccaacaccaactttttgaagcccgggggtgtgctactagatctgggagaggataataacagctgttgttcggagggacgtgagaatatttggggtgggtaggtgaaggaaccgcctatgcggatgcggacgggggtgtgtaagagggtggaggggtcctgccagaggtaggctgctggggggttgaggggggattgctggattgctagttccatgtgggggtggagatgggggtgaggttatggtgaagccgccgggtttttggcaggaagggaagggggggtagtagaggtctacccattggccggggaggaagctgatggggggttgggagggttgggagggcgtgaggtggaagaggcggattgcgggggttatgggggttatggtggttatgaggagttcgtggagggactagagggatgttagtagagctgggggatgaaggaggacaggggaagaggtacgttatcgcggggttcgtgagcggtgcggtcgatgtgggttgttttgttggtgggggtcatggtggaggttttggtgggggtttgtaggatttggagccaaatttgagaaaccttgggagagatatggagagtaatgattgaggcaaagaactgcgttttataatcatcaagttcatagatcaagtggtcaaaatgaggttgtttacatacgcattcttgtgaggttggatccggggttaagagtgagcgtgaggagctggttgaccccaccaaattagtcagtttgagcaagtactcttattgcatgtagtatttcacaatacctacactctggtttttcacctaagtagatcttgacaaagcctagaaagatgttttgtgaccctttctaacctctatctacagaatctgcaaaataacatgctgtgcttgtgccaggtgttggtaacacatgtgaatgtggtgaacttgttcaagttccacaagcagaaatgccaaggtgggttgggtgtgggcctggtcagtgcgcttgaggccacagggatcatggcctatctagcgggaaagctgccggcaggcaagacaaacaggttctcgtgacatccaaagaaaagacaacagctgctgcacgcaacaaaccagcagttggttttccgtcttttcgtgcctaaggaacctatgagcttttggatcgtgtctccgccgcaagaaccgtctcaagctctccaagctggagcaatcaaggtatgcctgatcttgcgcgcgcacatggtagagggccccactaacctagaaccctaccggtcacattttctgtacaggaacgcgcaagatccaccagagcactcttcacctgctcagagaaactcgcacgaaactggaaccaggacagcgaccctgctgactccctccgctcccacagctgcccaggatgcgaaaagtgcgaaagagtaagcccttgatctacctgtgatgccaggcgaactcttctgtgcagcgtaacctaaccttattgccaggaaggagctcgactaccaccgcaccgcacacacttttccagactatgggtattgcgcctgtgtccatgaaactgtcctgactacgccgaagctaatcactgcctgtggtaaagccctgtaaagcgcagtgtcgacatgtctctccgatcggtgttcaaatcacttgtacgtctcgacttcattgcaatcataatgcaggattgctactaactttcctagaatccctggggcgcgaaagccgtcaacaccctcgattcgagccccaagaagacgaccgaaaggccacaatcggcccattccaatgactctcgagaaacaccacgagcgaagcggcagaagacgagccgggataccgaagtaataccacgggggtcacaagagtctatcgaggaattcccgtctcaaccgattcaatcgcggggtcacacgtacagcccctcaatatctccttcgcctatcagttcgcatgttcatatgtggaattcacatgcaatggctgagtaccagggtcgaggcaatcgccgccaccggcataggtctcttggtagcaacaagagtcagtcctcggccgaggactttcccagtgcgttcggtcagaaatacactgcccccgataatcaagaacaaactcggtctaaagtgcaaagcgatgcggccgacttggagattctgaggaatatatcagcccacttacagcctgcccaacccaaggggaagaagagactgaaacaggaatcccacgaagacgacgagctggcaatgggtcatacgcccaatgatggcaagaagcgccagccagggcccagcgtctctcgcaggggcgatatagtccctacacaattccccagaaaggcagccaacggtcgtgaggactgtcagtctcttggagagtccgaacgcttcactgtttctgcagcagtctgttaccggaattactattatgtggctggtgagaaagccgggacagatgcatgctacatgcaagcacatcatgataaacctcaggcggaacttcgcgcctttacacaaaatggaaacccccacgggacgcaacagtggctcaagcttacaaacaagatcaaagccttgcattttcacccgtccagtagcctcattaaggtcactcaacccactgatacatctctggacatcggtaaactgctggtcatcaagtttgcgactcctcaggatgcttcatctgttgctcgttgggctacaagggttctcaaggtaaaggtggtggaagaggaagacaggtacatatcctcgaagcatttcgtcctccgccctcgctaaccatactctagtaacaagctccatgccatttatgacaaagcactcggtgaaatcaatcgagataccccatggtcatcagcaggcaaagtcgctggtgcgggatctcctaatgctcagcctcccgatgctggcaaggcacggggcaccagtgctagcattacacccagccaagtctcaccctcgaacaaaccgagaaccaccatccgcggttccatgcaagtttcggagcccgcaacaccccaaccagtcgcgacttacggcagacgatctttgaggtcaactcatggatcaacgacagatgcgacttccgctccaattgatgtagatctatcattatcgcctgagacccctcctccgcctcgttggtctttgcaaaacaggagctggttggaagactggaagacaccgttacaatttggcagagtacaggtgaccaaggatgacataccaagactggatgagggccagtatctgaacgacagcatcattgaatttggtttaaagtacctttttgaaaagttcactgacaagcatcccgatctcagcaagcgagtctacatgcacaacagctttttctacacgagtttgaccggggacggtggcaaccaattcaagtacgaaaatgtcaagagatggactgcaaaggtggatctgctgtcctatgactacattgtcgtcccaatcaaccagcacttccactggtgggttgccataatttgcaacccagggaaacttgatccggctgttcgtcataaggccaaagaagccgaagccacgatccctatcgacgtctaaatgactgatgcaccaaagctggttacgtctgatgttgtggacaaagccaccgatggcaaacccggattcggcccattagcttctactcagccaaagcaacgcaagcctgcttatagccttgatgaccccagaatcattctcttggactcgctcggatctagtcacggccctgccgttaagaacctccgccgatatctcgttgaagagttcgaagacaagcgtggcaggaggcttgagcaaggtgattggccaactcgccttgggatgaaggccactaatataccgcagcaatcgaatctcacagactgcggagtctatgtccttggatacgtgcaagagtttgtcaaggatccagataccttcgtcaaggctctgctgtctaaggagccgcacgaatgggcattaagtgcccccctattgcgaacgctctggagggatactatcttctacgaaaagagtatgacccgcacagagcctggccggcagcaaaatgcggggatgatctatcccatgtccgcggagagaatgacaaaactttttgctcaaagcgccaaactgagcacctctccttctcgcgattcggttgtgggccggagggaggaatcacgacatgcagctgtaccagagccgctgaaacctgtggaaatggcgggagaaccggcgcaagggcgaatagggtctcctgtaaaggcaccaaagcccgcgaaaactgcaaaggagccagcaggacgtatgataccgacagaaggtgggaaggaggtaatcaagcctatggacctcgtcgtcgacacacccctcattccttctattgaggattctatcgaggactcccctaccccagaacctcctcaaatcaccgacctctccgcacttgtagagcccggtttctcgaagcacgtgcccaagcctaaagagcgccccgcttcaaagttggggacttcgccgacgcggcaatcttctcatgcggaagatgatgaagtcatgcttgtccctttgggtcgccctgactccacattgttcacggcgaggatatcgagttccccggcggaggcaaagaaagcggttgatacgtcggtgcaagagctcgacgcaaagtcattctgcaacaagtcagccacacctcctgggcacaccaagaatgcaaagcctcgccagccgacgcgccaggttgccctaatgtcacagtcatctcccgcccaggctcccaatccaaaacgtgctgatgctggctccacgtccacaggggcgtcgaagcgtcctcataccggttccacgcccactgggggttctcgcccaaaacgccctggtgccagctctccacctaccacgggctctcagtcgagatattttaatggtaccccatccccaggtcggaggcagcgagtggctacgaatgtaggagctgcgtacacatccgtgggttttgcacccaccagggaggctaccgtggagcagaacttggcagcggtgaagcattatgagccgatcaatattgatgactctgattgagttgtgagcggtggttattatactctagcagcaatcccaaagcgacgttgtagccatgttgggcccgattannnnnnnnnnnnnnnnnnnnnnnnnnnnnnnnnnnnnnnnnnnnnnnnnnnnnnnnnnnnnnnnnnnnnnnnnnnnnnnnnnnnnnnnnnnnnnnnnnnnnnnnnnnnnnnnnnnnnnnnnnnnnnnnnnnnnnnnnnnnnnnnnnnnnncttctccaatataagtttgtttcgttccgtttctttttcttcttatctattttggcttgtgggttacggaaacattgattatcatcctggttttgctcaaggtaaggcgcagaagagagtgggtatttatcaatatgtgggattatttggcaagcatgggataggagtttgggtcctggtattgtttgttagctgtttgcctatcggaggagagtggggtttggggacagatctgggtacctatgtaggtgaggctggggggaagggtgatagagagcgcttgatagaataggaggagtacacggaaggggggtaggggcagagaaatgaaaagatattgttttgtgtatgtatttttagacatcagcgatggggagggttcatggggagttgagcaattgtaccatttcccaggcagcttgaaaattatttacctcgtctgtttgtgtgttcatgtgagaatctggccatgggtaatttgggtttatcaaatggatactcctgcatgttaggtatacgaagttacaggcgagttttcttctcggtggacctacctatatgagaacgggttgcaatagggtgcctacctatgtttacaaacccgacatggcaatttttatgttggcatctaatggtcaagttttggcgatggacgaccccaagttaacaaactgaccaagatgtttcaagaaaaaatatcagggagtaaaaaaaataaaaaaaataaaaaaaagaaaactcaacaagacacaaaaattggagtgggatgattttactttgatctttttcacagattgggttgggtttcgtggtataactgatatatggggcagataaacaggaggatgaaaatgataaaggaaaagaagaatagggtacgctgtgttttagtatagtgttgattgtttggggggtgaaatataccgtagagtttgtgtgtagggatcttgattgatgttgtgtgggtggaggttgtgtgaatgggggttgtgggattgaggtttggtttacatgagtttggtgatggttttggtgatggttttggtgatggttttggtgatggtgcttgtgtggtgatgatcttctttcgcggatgtttcaagaacaggggatcagacggtacaatgggcagtactatgtacattacactgatggcattctccagttccttttcctgtcaaagataacgatcgaatatatacaggtatacagccaaaccagcttcaaccaccaggcgagtagtatcgacaagcagccttcccattttatttactccagataaaacactgttcaattggggataaaacaaactcatcaaacgccgtgccatgcatatctaccgaaccaaagtagaaccccccgcgcccctctaattgtttattcctcaccggagcatgcccattagtctcctcctccttcttcttgtcaaccacattcttaggcacctcataaacgaccaacccacatctcccctccttcatgtacttccacctcccaagtctcatctccttcccggtaaccgccaccacgcagagtccgtccttgcctctctcccctctctcaaacacggcaagatcgttcacgattcccctcgcgagactcttttcttccttgtcgccactgtcctccgagtctattggctgccccagaacacccaccctctcaatcttcttcttatcatcactcagcctccacaccctgacactcccatcccagctcccgctaaagatcagatccgagtaaggaaccgttctcaaagctgtgataccccttggctgagggggaggaatatccttagggttaaaatcctccggattcccaccagaaagctccctaggactcaacgcagggtccagaccatgcgctctcgcaaccacgtgcaaagcctttttcctctgaatgctccaaagcgccaaatcgccattgtcactgcccgtgacaaatatctcgtcatccaacatcgcgactctgtccattgacccctcatgagcagcgctcgctggattcagcccggccggaagtttgtgtttcttggtgttggtcgacccgccctcaccgccacctctaaacacaagctgagattcctcaggcaccttccagtaacgggctgtacgatctctcgcgccgactgacacgcagcgctcctggcccaaggcatccacgtccataatctcgtcttggtggccgaacaatgtttcgacgtacgccaattcgttcagggagaagaccttgactgtgcggtccttggagcaggagaagatctggttggtgccccggcggaaggcaatgccggtgacggcgtcgcggtgctgggtgaaggctcggataggcttgagggtctcggcgtcgtagacgaccagcttgcggtcgaggccgccggtgacgacaaacttgccgtcttgggatgcttttactgtaattggagccgcggtgtggccttggaaggtcttgtccttggctttgaggggctgagacttgacaaaggcgatgcgctcaggtctgcgcttgggaggggcagggggcttcttgggctttttgcgggtggtttgaggccattggttcttggggaggtcttggagcttccatttggtgaggtagccgtcttttgtggttgtgtaggcatacggagggcagacagagacggaggtgacggtgcccgagttccaccggaactggatggggtcggcgtgggggaagtcgagttcgggggcgagcttgcggtagaccttgcctttggtctcggcggcgtcctcttggaggcgctcggccaaaagatcgcggtcgatttcctcggcatcgaaggcgtactcgtcctgcagctcgtcgacttcctttcgcgtcttctcgaggtagcgctgggcgagtctcagacgcttctcggcggcggtctcgccctcgttgtcggcatcatccgagccgcttctgctgacaatgtcatcgtcttcgttctcggtatcgagttcactgccggatatgtcttcgtcgcgctcaatgtccttctttttcttgagagccgcggtgggcttggtggggcctcttgtcgcggatttggaggatgattttgtggtcgccaatcgcttcttggggacttctgtggctgctggacgcttcctcttcttctgggcgcccggggttgtgaaaaaggacgacatggtgggcaattttggccgtgttgtcgctgctttggcagtcttttctcaccagccgaatgctgcagcttcaaaatttcttgagccgtcgttagaaaaaaaaagttgtcggcctgcacgagtggagaaacacccctggtcgggtcttggcgtcccttgcgaccaaagaaatcggagaaggaaaatgccggccgccactgcttcgagctccaccactgtggggtatgcttgtatggaaggctgcggctcttctgaatgtcattgatgtgtttgatagagatacggatagctacgaaataaacgctattttggcatcattgaatatcgcggtactgtccctcattcttcaccactatctccatcctctgacattttgtcggccccgtcttggtcgccagcagttccattcgcagccttcttggccttttccttctgccttctcttcaacttcttctccctgttcagtcgcttcttcttctccttaaggtgctcttcctttgtgagcttcttgctctcttcttccttgcgcttctgttccctgattcgaagcttgatcctggtcttctttcctggcctctttttcttcttatctccctcttctacaatcttgcctccagcagtcattgttgtgggttttttggtggccacaatctcaatcttcgtcaccctccatggtacctctagaccccacgctctttgtttcgatagcgccagaatgtcttgggccgacatggcggagtgtcgtatttgctcttgctgttcgggggtgaggggctcttgtatgtaataactgagaggccgttctttgaagggtatttcctctgttgaggcctgtagctcatcctctttcggcgcaagcactactttttgtgttggtgctgatgagaagagccggaacgaaaattcttcttcttggttctcttcattttctagtggtggttgtgtctcttggtctgcatcggccatggagacatcaccctcggcctcatgttgtggtggcgcagcgaggttgatggctaagagacttgagagtttttgccggagaaggctggcatcttgttctgaagatatatacctgtgcacttccccctcgtcagaagacgagtagaggtcttccctcctcactctgatacgaaaatatgttagcgcatgtatgagagagtgtgaatgaaggggcctaccgtttggcatctggaacctcgaacatggtcgaattgacacaatcgatgaaagaattaagaagtgggacacttgagagatgagactaatgaacggggcagagttgagtgtattgactgagattgttataggtgacttgagtttatgcttctgtgagaggttcaaaatgagagaggccattgagagctcaaaaaatcgatatgcgacaggtggtcagtgctccaacataggaaggctgaaggtgccccgcaaattcaactcccaaggtgcgcgttcccgcctgcctagctccagcccgccatacccagctccatccatgacccccagcaccagcatcaagcaaccttcgacgctcacctaacgtcccaaccaacgcaccacatctacaaattcacgccacagcagagacaaaatgtacgtcgcatctacccatcctatagagcacgcccatcattgacactttctagggaggttctactgggcattacgggcaaggactttacgctgatcgccgcgtcgaaggcggccatgcgtggagctaccatcctcaaggcgtccgacgacaagacaagacagttgaacaagcacacactcatggcctactctggcgaggctggtgataccggtcagtcaccacagtgttcatgtacaccttccggcagcatgctgacagaaccccacagtccagtttgccgattacatccaagccaacgcccagctctactcgatgcgcaacgagtcggacctttctccatcagctcttgctcactttgtccgcggtgaacttgctacgagtcttcggtcgagaaatccatacaacgtaaaccttcttttgggtggcgttgaccccatcacacacaagtctagcctgtactggttggactaccttgcgtcgctcgcccccgtcccatatgctgcccacggttatgctcagtatgatggaatccaattccaaaccctatatcaccccactaacaatatgccttcttagatactactgcctttctatcctggataagcaccaccaccccgacatcaccctcggccaaggcatcaaacttctcacactatgcgtcgacgagctcaagagaagactaccgatagacttcaaggggatgacggtcaaggcagtgaccaaggacggcgtggtagatatccagtttgatgacgacaaggtggtgaaggctgcttgatttaatgggttgcatttggagtctcgtgggggatttctcggtgtataatacctggcacggacgatgcatgcattcaatgggattttagaattcaggttctggttggcacatgacttgccagagttcaaggtgacttggtggtttcgtctcctgatgcctcaaatgcttcggatttggcccctgactggcaagagtggttacatccggaagctagtcaagtcgatcatacttgagtacacttggctggggtgcgtagaatgacgctgacacgggcagtaatgaggaaatctcctattttgacctgtgtttgctctattcccacagtcctctgcaagacaagcagagtgggggcacacccaaccacaacagacggtttgacacgctgcagacttggtttggcaccatttctggccgatagggcggtgagagggtgaagagccaatccaaagcaccttccccgcgctcaaagaagccttcgactttgttgagtgaggcggtgaggccgggttgcacgaatgcccccaagcccaagccactcatcgtaaccctctgttagtgtaatgatggccgatggctgatggcatcagggaaggggttgctcctgatctgttgccccgttcccgaaagggccccgcatgctgtttggtcgggtgcgtgccagacgtgccagacacttccaactgactcaagagacaactgtccgccggcgggttcctgcgttgaaaggagagagatgggaggcatgtttggtgtctaactctctgaaggaaggccaaacagccgtgacagccactcggcatgtccaacaggatcccaccactgcccacttggaagccccgtccagccgtcgtctgatgatgttgacgagaacagactttgtggaaattagagatacctttgcgcaagacaagaagggattgacagtcaccaacttaagccggaaccctttatgtgacgtatgttgccaccggaacacaagtagcaacctatctaatcagtagaggaagacatcgtcggcttaagggttggatcatcttgccccaccaagcgattgcttagcaattctctaactggcagaaggggaaggcgctgagtgggtagcagtgccaggttgggggcaacctgtgggtggttgctggctgctgcgggcgtgagtggcacaaagtgggtcccccagcacaggatccaaaactcttttctttctcgggtccctcacttttctcctctcctgaaaaatcttacccttttcctcccccacccatctctggatttctctaatccatcccgcatctcatctcactgtgcttttccctttggaattgtctttccttttttttctttttaaggatctgtttttgcaggtactttgaaaaggatcgcataggaagcatcacacacgctccctctcttcgtaatacctggttgttacgagccacgcgagccacctcgaaaagtcgcaggaaaccacttaatttcgcgctttctctgagcccaaccaatattctctcgatttcttcgtcttttcgactttgatttttcctcactactctcatttgaacaatcgcgttcgtctgagcccaacgatcagaaaataatcccgactttttattcgcctaccgactgaaataacctcagcaaatatggccgatcaactcagcggcggcatgggcaacctgtccctcgatcaggctcccgcggcggctcagctcgctggtcagcaccccggcggtcgctcttacattcctcctcaccttcgcggcaagattggggctaatgccccccctcctgccgtgaacaacggacctgctcctggtgccatgaacgggctcaacaacagtgcctgggctgggtaagtttcagacatcgcttgccatcacctgtgttgcaaaccgtgaatactaacctgatttgcccagcaacaacagcttcgatgctcgtgccaacaccaactttggtcccactcctggcggcgctgcttcttacgagtctgcccctccccctcagcagcagtcttggggcaaccgtcagggtggcttcaaccgcaacgcctacggcggtggacgctccaatgtcggcggtaacatgggcggcggcggcggtcctatcggccgcggtgagggtcgctggagcgatggccagcacatcattggcaaccccgacccgcgcgtcgagcgtgagctcttcggcactgctgatgacccgagcaagcagcacactggcatcaactttgagaagtacgacgacatcccggtcactccttccggccatgatgtccctgagcccgtcttgaccttctcccacccccctctggacaagcatctcttgagcaacatcgagcttgctcgctacaagatccctacccctgtccagaagtactcgatccccatcgtcattggcggtcgcgatttgatggcttgcgcccagacaggttccggcaagactggtggtttcttgttccccatccttcaccagtccttcgttcagggtccttcccccattcctgcccagggtggcggcggcggtggttaccgccagcgcaaggcgtaccccactgccctcatcttggcccccacccgtgagttggtctctcagatctacgatgagtcccgcaagttcgcctaccgttcgtgggtccgcccttgcgttgtctacggtggtgccgatataggctctcagctccgccaaatcgagcgcgggtgcgatcttcttgttgctacccccggcagattggtcgacctcatagagcgtggtcgcatctccctctgcaacatcaagtatcttgtccttgacgaggccgatcgcatgcttgatatgggtttcgagccccaaattcgccgcatcgtccagggtgaggacatgcctcttaccggccaacgccaaactctcatgttttcggccaccttcccccgcgacatccagatgctcgctcaggatttcttgaacgactacgtcttcttgtctgtcggtcgtgttggttctacttcagagaacatcacccagaaggtcgagtacgttgaggatgttgacaagcgctccgtccttcttgatatccttcacacccacgccggtggtctcacccttatctttgttgagaccaagcgcatggccgactccctttcggatttcttgatcaaccagaacttccccgccacctcgattcacggtgatcgtacccagcgtgagcgtgagcgtgccctcgagcttttccgcaatggcaagtgccctatcttggttgccactgctgttgctgcccgtggtttggatattcccaacgtcacccacgttatcaactacgatctccccaccgacattgatgactacgttcatcgtatcggtcgtaccggccgtgctggcaacaccggtattgctactgctttcttcaaccgtggcaaccgtggtgtcgtccgcgagctcctcgagcttctcaaggaggccaaccaggaggttcccggcttcctcgagaccattgctcgtgagtcttccttcggcggtggacgtggcggccgtggtggtggcggtcgcggtcgtggccgtggcggcaacaccgatttccgcaagggcggtggtttcagcggtggcggtggtggtggttatggcggcggtggtttcggtggacacagctctggcggcggcggcggcttcggcggcggcggtggtggctacggcggtgctccccccagcggaggctttggcggcggtggttatggcagcggcggcggcggtggtggtggttacagcggtggcggcggctacggcaaccctggcggcggtggtggtcagtcgtggtggtaaatataccacttcacgtcgtgaatcacctcaacacccacttttacatcattggcatccggcactgcatcgttcagcactgcatggtttaccaaggattctgtctcgcttttgttttgttcttttattgtttggcacatggaattgttatgcggcgatcatgactttcattctttcgcaacccagcagggatcgagtccgatggttttttcgagtttgacgatggagatcgggctttccctactcgatacagaaccacacgttcgacgatttgatacccttttagaccgcattattcggaagtcgacaactcgaccgcgagtgcattcacatgccacacgcggcatacatatgcggtttcggttttcggctggtgtaatctagtcatcattttcctgctcttgccttgcatttccggcagggcacgaagttcacattagagatgggaggcatgggcgccgctggccttttcgattttctgtttttcaatttcttcacttgacgaccatcacacatagacaaaagtggatttctcggttctttttctctggccggtttcagcaacggtaccggcaggagatgggtcttacaacaacaaaaacgggacctttcaaaagattagaattccatttttttcggcagtttgaggactgggagcaggttaatggagcatttgatacccctttgaagatggaactctgacgacggatgggggctacaaaaatgcttgtggctctcctctattcagagcgtttggcattggcacggccggtcgcaaaaaagacatcgggcacgaagcgcaacggacattgtgcgcaaggagcgcctgggattttgcggaaggctaaaagggggattggcacgaatctgaattctactcggacagtggcggctgttcccgctcggaggctcgagacaagacaaatcgtctatgtataatggagtccaaattaaaatccattttttacaccaaacagttgtgattgtgtgtaatgtgtgtgatgttttgatgtgtctcatgacttgtgaaagaaaatgaggtctgaatacgtgtaagagtcttgtgatcttgtggaaggtaatgatcgtgatgtttgatagacctgatatcggatggttttgtatccgtacatgactgggatagtttctggttacgatagctggtatttgacatgtgcacatgatgaatagttatgaatatccagttccctgttttccatttttgttctcctatttgacaactctgccagacagcctcccatctgtccctggaccagctgaacctttgccctctccttttcgcttcctaggtccagtaaccgctagtttttgtgtaaactactcatagtgattctggttcgtctgtcgtaaccctcgtgggtctctatacaatatcccatgccatgtccagcctatccacaatcccactcccaaaaaagctattacacttgtacacagcaacaccccaaacactactacagcaacgtcccacaccatacaaaaaatcaagtcgtcaactcctccaatatcccctccaactcctccttcccaaacggcaaactcaacagctccgtccccaacgcgtccttgtgactagtaataatctgatgatcgtgaaacctatttttttttctcttgtcagcatatcacacccgatttcatctcagaataaaatacgtactccttcaacaacgtcctaaacgccatctcactactacagataaactcctccaccgccttgttatacaccatcctatactccacactgatctcctctccttgcccctgaccctgaccatcaccctcatccgcacataaaacctccccaaccagcagtctaaacaagctctttgcattctccggcagcgacctcaacacaaacgccactccctccttcccccccacccgtcgagtcttccgacccaagagttcatgcaccgagtcgacaacctccatttcagagggggagtacgaacaaaaagtggtgcagtcatggtagagaaaccgaaagtttgtgccgactgccgagtcccatagtagggcaaaatcaggggagtcggttgtgcagcagaggtagacttgtgcgtgagaggcaagggtggagattatcgactgaaaggaccccttgcggagatggggggaggagacagagtttaggaggatggtcaaggttgtgtttgggtgggttgttagataggagaggatacccgggagggtggttgttggggaggatactgctgaggcgagggagcagaggagttctctgatggtgatggagggggtgtacccgtttattatgacgattttgttggcttgacccaaggagcaaggggggtgtgaggagaggtatgtagcgaatttgtggaggatttgacgtttggagccgtagccgtagaggcagagggagaaggactgggagagttcaaaggcccattgggggaaggaggatacgtggagggaggcgaggtgggtgatgtcggttttgtgggggttggcggacgagaggtcgcgggagagggagaagtattcgtcgtgggtgaggagttggagggaggacagggtgttgttggaggttttggaaagcccgggtttgttttggaagaagtattgctcgtgaggggggagatcgcgggggggtgtgggggagcgttttcgggttctggttgtggtggttttgcgttttcggccgggggcgaatttggagggtgttgttgtcggttcggtttctccgtttagattctcttcttctccttcttcgtcttcttcgtcttcttcgtcttcgctggattcgtagatttctcttgctatgtccccttcttcggcttcatcgtcgctgatggcgccgcttatcacacggtcgacgagggccctggcgcttttccgtctggcggatctgtctgcgttattcttcctgcttggtgtgtctatcccgttgagaccattgagttttattggtgtcgctactgttttcttcagcctcgaggctgagggcgtactgacggtggcatcgtctgtgtcagcggctgctgtggcggcatgacgtcgtcgtttcggtggctcaatttcgtcttcttctgggatttcgtaaggatcggtagttgctggtcgttttcggggtaccctagcggcagctttctgatttgtggtcttttttgggggcattttttgttcttggcggatatgtgatggatgataatcctttggtggtagtttaatggagacgcgcccagggttcaattgacgcgacttttgatgtggcccgagctccccctctgtatcatcccaggggttctttgcacggactctcagtgacgtatttgctataacctctaagaaccgccctctcgacatttttaacatgaatctcaatttatctgcctcactaaacatatttaaactgctggcgaagccgtcattatgtcttccccaggcaacggtagccacctttgccgaccttccaataccgctcgacaaggcgtttgcgggacagagagagaaggttgatatcaaggcggtggtcttggacaaggatgactgctttgcttatccggagcataatgaggtctacgaccagtacaaggtatccctcctaattgttcagtgcctcacgtgtagaaaaatgttaaaatattgtacagcaacgtttcgaggcattgcgagctgcctacccaggtcgccgtctcctgattgtctccaacacttctggagcccagagttatgaccgtgatggaaagctcgccgctgccgttgagaaggctaccggtgttgtcgttcttccacatcagaccaagaagcccgggtgtggcgatgaaatcatgtcctatttccgcaagcatcccgagacaggagtgaccagcccaagtcagatcgccgttgtcggagatcgtttgtccacagacattatgctggccaatatgatgggaagttggggagtctgggtcaaggacggcgttgttcctctgtcggagaagagcgtggtaagtttttgcgcagggaaatgagttgggaatgggagctcaccatgcttgcagttctctaagatggaaagaaggctagctccatggctcatcgcccgaggttacacggcgcctgatccctcaagtcctttcgagtgaaccgcaccgtcttcccaaatcgtcagatcacgctcaactcgaagggttctgagaatttgcttcagaaagccacagtttccaacccacacccaagacacgcattgcctgggagacgtttaccaacaatggccaataactggaatacttgacgccattgggttctcctgaacatgctgggccatggcccgccagatggcaataacccggcccgccggaggaaatggacaaaatgcttgcttacctgatgggatagcaatgggcacatacattctacctgtgtaacatggtgattgactgctgattggctgggctccggaggtttatcaccgctgaacacagtgtccttgagtcctctcgagggggatgttcaatgatggggttggatgaatagggtttactggagcttgatctctttgtacaacatcatgtaatattatccagtacctcgatggcctgcttgcttgataggtcatgatatgtgatgcttgagccagtgactccaaccatagtgacttgtcacccccattccacggtgataatcgagggttccagaacagtgtatacgcccctgaagagtgttccctatcatgctagaggactcggaatagctgtattatcgcccatcggcacaatctttccagtacgctctctattccttgctgaaagccagtccgccttgcaagctcctttcgtttttcacgttttatattccgttgtaaaaccggtaacgtccccacattactatttcccatggagttattcatcttatagatggtctcttacatgcaagatcacctagggtctgaatgtctcgagttccgtccaagattgaccttgaaactaccttagtaaacagggcagtaagaaagatatgatctttgtgatgtgacttcacagtctcgaagactcacagtcatgcgtcgagaaatgcaggcggctcacaagggttgtgctgtactcctcgtgaacttgcacgtgaggaggactccagtcatcagatacaatagctctctctctctcagctggaagcattaatggcctctccggtgtatcgcagagacggcatgcttttcattcacgtgcggggagtgatgtgagttgaaggccgactttttcaaggatccatgttgagacttgggccacctgaccttggtggaatgacagtgtcagttggctagacgtgaaatatatgagactgcgatggtgggtatctgtcagatatttaggaaggagaagtatgaaatcatcaagcgtcgccggtctgatcaaaagtctagaaagatatcactcatcacttgtctttatgaacacttttctttgcgtccgaccgccttcgcagacaatttatccgctctgtgcttcttgtatttgggacaatgaaagagggcgttggctgcaagtgatagttcacctttagacataatgaacagttgctctaagttgatattcaccggtaaaaaaactcccgacctcggtcgcacagtcgctgagatagcgtgggagcttgaccgagataggtgagcaagtttccatttgcttagagcactcagattccccagcaagtgctgataattcgcaattggcggacttgtttgctcatgagcggggtgccgccgaatcccccacaaagattgaatcggacgaacaaagtgacaaaggctccgcggccgtatgatagagactaagagtgattaatgatgccggtcaagaagacccccatcctgctccggccgcaagggaaagcttcacgtggtccatcccactctgcaaacgctgctccaggacggcagagagcgatagagaccgcattgttgtctttttcgacgtcatatccactctcaagatcagattgtcagcttcctgccagatagcaatggccagaagcggagataggggtggcttacatgaaaggccagcccgtgaccgtgctcccagtgatctattgtcaaatttcagctcgcgtcgacaatagcaaacagacatcggatgacattggagctgggtttcattggttcgagtaggagcaatgcgactttagatgaagacattcaccgcgaggctgtggaggtggtcggcgacagtgaatatacccaagggaacactgtgctggccatccccgggtataaataacttcctcttccctctccctggctgtttttctctttttagattaacgatcaagactttgactgctatccggattcttagcagctacaaagtcacccccagcttgaaaagcgtccatccagcaaccaattctcttttggtacctgtaagtgaagactttcaagccctaccctcacttttatacccctcaaaggctttctgggggcccaccagctacgtcgtacacgtccccaaccacgtctttgacccatgattctactctttgaacatctcaccttcaattgcccccagaagacctatcattaccccttcacacccctcttagccctcaaaacacccatcacaccaccaatggacgcctggacgaaatctctggacgccttggattatcttccggtcgcctcaagttatctttttgacgcctcgaattatatctatcacgcctatcattagatttcggacgcctataacaacatcataaacatctataacacccattcaaatgcctattcaccacggttcaaggcgtccagatttcgaaacaacacccttccacactcttcacatgccttcacccccatcttacacctcaagtatgcatacaattaacatccccacagatcacatcaccatgcccccacccagcaccgtaggcaaaggcggcaaagcctggatccgagaagaggagttcctcttctggaagaaactcgtcccgttcaccaagaagcgctgtggtgatgatatcgagaataacgaggagcatgggtggaattgggttgcatccgagatgaggaagaggatgagggagaagtacctgaaggaaggggagcctgaccgtaggaattacacaggactcgcaatgtgtaagtcttttttgttgaagcatattggttatggggagtggggctgacgtgagacagtcgagcattactggcagagtgcccgtcatagacgcccgactgttgctgctggccggtttcccaaccggtattgcaatttgggtatgtcttcaatagttcacccctcagaagatcagtagctaactccgtcctagaagccaacgaagagcaagtccgggagcgcgacgaacgcctcgtcgccatccgcaagaagcgccgtgatgcccgcaaggcagcgcgcaaggcagcccgtgaagctcgtgaagcccgcgaggctgaagaagccgccgacggcagtcccatcagggagagcatcgagtcggacaacaaggacgctgacatgagcgatgacacagatgaaacctccgacaatgacgaggaagaaacccccgagtttgacgaagcagaagccatccgtaagatggaggagtccaccaagatcaagcaagagggcggccccgagtacgagtctgacgaggaggacaccgagtctgagcccgacgccaaaccccgtcgtcgcaaggggggcaagaacaacaggcgcgctagtatcaaggagaaccggcgttcagggtcgccggagatgacgccttttgcaaataatgggactatggctgctaagaggagggagaggttgcgtgctggggaggagatgaggaggaggaatagggagatgtatgcgatgttggggaggggggaggggaatggggggtgttatgggggacaggggcaggggcaagggcagatgagaagttgattttagggggttaggatggggtgattcaggggtgatgggagagggtttattgagggtgtgttggcgaagcgggacaggtggttttggttgggtcagggagccatgatagggagagcaagggaaaagtatggtaatggcgttgcaagaagcgcatggaaagtcatggtcatgggaactaaagaggtggattgatgagttacggaatggcgaagttcgtggacgatttaacaacttggcttgataccttagtcactaggttctatatactttatgccaatcctgatttctattcctaaatttcttctcgccgctttgcatttcatgggggaaaaaatgaaatgtctgttgttcccaaccaattgagctgtctaactactatgaaagaagaaaaaagaacaaacctgaggacggatgtgaacaaaccaaaaatcggcattgcgaataacacactaatataattccaagttcccttgccaaagttcaacaatcacctctaataggtccgctggcgtaatggcagcgcgtctgactacgattccttcccaggatcaagtaatcaggaggttccaggttcgacccctgggcggatcggtttcttttgcctaaccttttctgtataccctcagactcacgccttctttttcacttttctcattcccaaaaatgacgtgagtatctgttgagttatggtacgaaagctaagaacaatgttgttgaggaaatttttcggtagcttcgatgttgagttttcgcccgcgttggtggggcaaccgagctcatcaaaaagggggttctcaccaagattcaagcttcacgatcatctcgattgtgcgtcagccatcctgtggttagcggccttgagtggctgacatgtggtatgttcccgaggataagaagatgaagccattccacggtctgttacagcctcgtggagggggtggcgggtggtgggagatgaactgaaccgatggcgagtggcttgacatttcggtcccgtgtgttcttccggctgtgcgctccgagtctctctatattccagtagcttgcgtaccttcagcccaaggggttcgttcgctgtggagagaggcgtacctttgtgcggtttgtggcgggacaacaagatagcaccttcaaggtggtgctggtaatttcttctttttttctgtagttcttatttcgtgtagaaagaagtgaagattccgcttacgtgcatttgtgtatcgcaccaagacccatgatttgcctcaaacaaaaacttcaaaacctttttgcgccttgcactcttagggcaccgagatatatggtacctctcaaccaaaaaccccagaacctttttgcccccttttgctccatcttcaaggaagagtgaaaacatcgcgtatcacggaaaataagtacactgcttgcgatgagtaggagaccacagggatttcacgttagtggaactcacatgtagcaataatacagtgtttttgtcttttggcagtggccggccactcttccacttatcttgcgtcggctttggcttttttttgtgttttttcttttttctttctttttttttcttttttttctttttttcttctttttttctttacgcttcttcctgtagtaatacagtcaatctgaatggtagttgtatggcctctatggaccatcgtggtacctaaaactactgacaacttcagcaaagggacaacactggggggaagtcataaaaagatcaaggtttgacgagcaagggcagaaaggcgaatcggtgctttgacgtagcttgaaggggttggaaaggggggatgagatcgatatggaagcgacgcggatgaagcataggcattgcccacacttactcaaactccagcaccaggcacccatgacgtagatttcagcttcctatcacctttgaattcgatcaggcgccatctatcccagaagacatatccccagtcacgggggctaggcttccgcacatcacccccgtaggcattgaggtacttcccgttgcacaccaggacccaaccatagggaggctcgctctctgactcaccaacataagggagaggatctcccctatcctgggcgaggtcatgctctgtgatgccactacgacgtctcaatcgctgaggaccttggccgaggacgttttccatgaatccataccccggagtccactgattgcctggtcgtatcgtgatcatgctataaaagttaacgtctcccagagccgagttaaatcctcgtaggccccaggaagcagcaccgccagccaaggcgaattcatttgtgacggctgctcgggagtcagcgaaacacaaaacagggaggaaattgctcagatatgactcgaagcgcaccatgaaacaagttcttctccatcatccggaggcgagtcgtcatctcgtcatggaccaaggtgtacacggagaagatctcttcgacctcccacggccggaagagacaaaagaaatgcttaagcacctcttcctccttgtagttgagctgcaagtggcgtgactcgccgccaaacaagcagctgtagagctcaaaacggtagagtgccctcaaaagacgggtgttctccgtgggcgacagatgggtaaagatgggcggccgctgggggtcaaacctgcaaagaaagaggcgtgcaaaatgcacagtcagtggacgagcataagtgtgccaaaacaagaacattccaagaacagcatcttcgctgtagccgtcaatgggcttcccgattgtggatccatcacggtcgcgtaaattcttgtagttattcaactgctcttgaactttgtctctatcgacagacttgtcaactcgtagtgtagaagctttctgaagagccagggcatcggtcatgacgccagtgtccagtgacatcttgagatgcccagcaagcagagacttcttgttctcgagatacattcgaagaaagacgggtgatgcttgcacgagagacatgaggtcggtaaagtcgggaatgcagcggaggatattatctcgaagctcgtacggcagggcctcgagtgatccgagcgttgaagttgccctgggcttgatgagagactcgttatcagagatctgggatgactgagccatggattcgaatccaaagagattggtcacaatgtagtccaagcagcggaggattttctctggaagctcgtacggcagggtctcgagtgattggagcctggaagctggccaagacttcattcgaaactcgatagagatctggagtgactgagccatggatttgaatccagagagcttggccccgatgtagtccaagaagcgctcccagtagttgttgacaaatgacttgacttcgtgccagaggacttcccaacgccaggtctctgagcctgtggcagatggcattctaggcttggtgtgcaagatctttgacaaggcaatgccgcgtgccaacccggagagattgatgttcgtgtggcccaaaccttggcaggcatcgcagacataatggctaaacctttcgagcaggctgcgtttggatgctgggggcacgcttgagggagatgctgccctagatcgcggccgaggcttcttggacagcttgtcgactgatacaggtttccatgtcggtcgaggttggctggttgtccctgcttcgtcccagatggtcaagccctctgtcttgatcgacaaccaggatagaccagtagcagtcttatcggcgatgttagcaactgaaaggccacgcatttcaaatttcagacaagaaagccaggaggtgagacccaaaacccaaaccaaaaaaggagatgtgaagaggtgagtacgagtaagtaatctgagtgaaaaagttttttgcaggcagtcagctagctgactcgtgaaggccgttgagactacggccatatagtgagttgatggccgatcgatacgagggagcgcgaggaaccgtttgctcctgttgttcaatgcccggtggatgaaccaagcaaggcaaatgcttatcttcttgagcatgttatcaagtgtgtgataacatcatcagcctgtcgaccgtgtcttttctgtgatgatggcaaccgagagatatggaactctatccggcccggccgttgactgagatatgtggggttaaaaggcatcttgatgtcatggatggcgtaaatggcttgctgtcaagttgagaacgaggtctgacagcagagaggcgattggcgtgttgttgagccaggcgatgggatcggtccgggcaccatggcacgtgatggcgctgatgaggaaagaagccaacatgcccagcaggaaggcacctcggtagccgctaagaaatggatcccgtcgacgcttgatgactttcctggggtaaatggggaacagcagcatctcgatttcttggagtagtagtgccacagttgtcaaatcacatggcagatcgcatggcctcatcgtggtcattcttgttaccgctaccaaaccatcgaattctattccgggtatacttgcaaacacacactactatggcaccactacgccaacctcttcctcagctgtcacagccaactccgcagctctctccatccgtcttgcctttctgttgccagtcgccttctgcagctgctccctcctctcctgcttcctcgccgccttatcaacaagaccaataaccttttgttctccaatcacgggatgcctagccgccgcagccgccgcctcgtcctcttcggtccattcgatcggcaacgtggcaaacaccagatacgaggtgtgtgtcttgatctcaggctcgccgcgggtgatcagccggccttccatccacatgggcacccctgacggcaacgcctcaaagctctctggggagtcaggtttgtggtcaatcttgactttcttctcgccgccgcgcttccttccgcctttctgttccttcttctcacgccgcttgatcagtccgtcatcctcgtcgccgtccatctcgtcatccgactctttcgacctggcggcatgctcccggaaccgagcttcaatctcagtcagccgagagagagcctcatcgacatcacgagccgaattgttgacaccgcggtccatggagaggttcagaccgacacgttcacgggaagtgtggtactttctgttggcaatctcaaccatgtcgatatcgacccaacccaagcgccgcattgccgaaactgtcttggtgacctgctcgatacatggtgaaaaggtgcagatgtgggcgctcttctttgggttaagtggtgatacccactctttgtcttctgggttcttggggttccgcctggagaggtgatgtagtgcctcccaaggagctgggagatcgagaaagatggcctcggcctcgggactcttgccatcaatcaagaagccgccgttgtagacatcccgatgtgtcaagtggaccaagctgttgaggttgtgttccttcagctcctgattcatcttgtggaagcgttgctcatggaactcaaagctgtagactttgcccttgcgctctccttcacttggatatccattgtagacggctcgtacagaggcgtggctgaagctgccgctgccagcaccagcctcaatcaacacagagccaggtctggcacgtattctgtgtaaaacatagctgtaatctggcgtatagacgacctgcgttcggtgcggcaagctgctcgtccatacttcgggggttggggggaggatgtggatgaagccgctgacgtcggcgacaatctttttggcgacagcggcggagtcgtcattgacttcggcaggcgtactttcttgctcggttttctcctcggcaacagtggccgaagcctcctttccgtcgtcatcgctcttgttacgcttcctcttattgttgcgacctcgggagccagtgtcgactttcgatgcgcgaatttgtgagccccatggcacgccaatcatggtcgagtgaggaaaggagccatagcgggtgttgacgacagcgccctcggcgtacccatcgtgtttcccggagggggctttgaggtagactggttggaggttgtcgcgggagagctggagaatggccagcgacccgaccttggtagttttgcctggctccaagaaaggcgagatcttgggcgtctggctgcgcgttttgggtgccattgtgtcgtccatagcgactgatgggcagcgtttcgcgggctggaagatgttgaagtgatgaaattgattcgcagctgcggaaaggtttcagggacaacagctggtgaaaattcagtggggtgtggggcgcggggcggaattggagcgtaaattacacttgtcgagacatctccagagcatacactcttgatgaatgacaggcacaaagtaagactgctgacatacaattttactaggatagtctcagctatcatatcatcctcaagaagcaaccgcacttccccgcgacgcacgattaatcccgacaaggtgtaatttacctttcactttacaccggtaattcatgcaccttggcggtcgggacaaaaataagcttttgccaagaatgcggggagctccaccagttccagagacccccactgccgctatcgaggtgcttggtccggatcagaaagatatcacaccttctgagatgttgagtgctattgagggatttcaccatcggactacggtacctatgcttcagccctttccgccctctcacacatctggaaccttcccttagcttcatctcgccgaaaaccatcagccatcaaccaccaatctcccggatcgatcaccaccggcctcgtaacccaccacatgatgacctcacaacaaccggaacaacccctcaatacccagaaaatctcatcgactcatgaatctcatggttcctacctccccattagcaaacatctccctggccttatatcaaccaacccattcactcacggattccattcatccctttccccatactgctgatcatacagctcctccacttgccgcctagcatgctccctcccccgctccctgtctctttcattccccccatcccggccatggtgcctctcccatagcttgtcggcttccgcgcccgccatggcagcaagcgcttccttggcaaagccgtgggagactggctcgcctttgcggcgttgttccttttcccagaggtgcatcgcttcaaaggctgccgcgccgccgaggatctcgtggccgaggttgggtttggaggaagggcggtcgtcgttggagtatagttggtcgcgggcgtctcttgcctcgactgcaattatcagcatacccgtgtcaaagtgagggtagtgggaggcactaactgaagtcgaagaaacccatgttggtagattttgaggaggtgataaactggatgtggtagatggaattagtatatggatggaatttgcagaagcaggacaggtcaaagactcaagcgcttgcttctgatgggcatgcgaaccccttatgtagaaagctaggtatacaaccccctcattccgagtcatgtcccatcccacctcataaccgtagagctgtccagctcgtcgtgaaagagcttgaccagcaggttgactatcatcggatgatcaagcgcagctgtcatgacatcaggtatgcgttcatttacgaacactaccacccttattcagatgaacgaacagtcgtgtagatccgctcatccataatttaagtgaaaaataaataaaaaaccacaggaaaccccgggcacgctatcagtcaaacaaataaaagacacactatttactttgtttcctccttcaaagattggtgcgagtatatacgcaatagggagcaaaagaaaaagcacagctacaagtacctagctgaagctacagacaccttaaaactctacacctctatacaaatccccgctcaagtgttgaatagcgtatggctgcagagtggcttcgactggactccgcagttctgcttacccatcacacagcgtatatctctataaagtggattaagttccagtgaagtcagaagtgttcacatgcaacatcaccttgagcgcatgccaaaatctccctaaccactccatacaaaatcgtcattcttgtctatcataaggtatctcacccgtacatagtcattctcatgagctatccataaccattcataacccatacattattcccataacacctggctaccaaatcccaaccacgccctcaacccccccccccccttccccgttaacgatactgatacccccacccagccccatcacgactattactcggcatctgtcccggcggcctaatcactgttcccacaccggtaccactcggcgccacaaccatactaaacggccggcctccaacccccctaaacccaccaccaccactaccaaaaaccggccccccgctattaccccccccgttgaaaccttgcgaaggaaaaggcggataattccccggctggtacaacggcggctgagaattctgatgcaagtgctgaaccggttgctgatggtgtggcacttgcgccgtcatctgcagtgttcgcccgccctgctgcatttggccaccaccaccaccaccaccagcgtgttttgcattcttttgtagtttcatccccggactgctcggccccccacctcctttgcgcagactatcactcctaaaaagtttcccaatattgaagaaagagctcttttgtggttcttgctgcggtgggggggagaacatgcgttgcggttggataaattgctgtggttggggcggtggtgctgcctgggcttgagctcctggtgggttcatgtttgttgatgggggagatgtgggtggggtgaatgcggtgtatttttgcggttgagatggtggtggtgctggggaagaccggtttggagttggtgttgtccgtcgtaaagaggctgttctttggggtactaagccggggggcacacggtcgtctgtgttggggtgtgtgtgtaggtttgtgatttgcggtggtgatccgacaatggaccagcgtttgtttgtagtaggcggtggttgagaggaaagatctgtatcagggctgataaacatgctatatcggttattacttgtcgacgagggcggggaagcaccagctggcggaacttggcaatttgattttggcggcgctggggatactgaaggcgggatttgtgaaagatccactgggtgggagttgagcggatgatgaccagctgggagaacatatggagtcgctttagacacgggaggcgtccctgatgttggtgctttcggcggtaaagatggcggaggggtacgaagattcgagctgtgtgattttggtgtgtgaggcatctttggtcgtcgaggcggaccgtgctgattcggaatttgggaagatgaatctcgagcaccgctgtgattagatgcttgtcttgttgttaactgaggattcatataccctccatcgttagggccaggttgaagattcgagttttctccagcaccagactgaaagtattgagcctgccacggtgttggcctagtcgtcgggggcaaagattgacgtttgttggccgcacttgaaaactgtccatggtcctgattccgcgatgattcgcgcggaagaatatgctgtagaggtgtgccaacattcctgataggaccctgtggcgctggcattaccggcgtgttgtcaagagtgtaaacgttcgttgtgtccggcgatgagatctgaccaggtacggggcccgagtgaaccttcgccaagggctgtgccgtgacaccgagtaaatccccaggttcggctgcttgttgtcctttgccccacgtataagttcgagcagaaaaactgggaaacggtggctcggagggagtagttgctgcatgcttcgacggcaaaggcggcgtttgcggtggactgacaggatccgggaccctagttgcctgtatttctggcgtgctcattgcagggacggatgccatctggtggtctgatggcactggtgtggtctcccgggacactatgtaaacttcggtaggtggtgctgggggcctaagagtagatgatacggttggcaaacggttctggatatcaggaggaggaggaggagatttacgggtgagcttcaagggctgcgggacatcgggacttgagggcgggaggggagcagcaacatccggagatcgcgtcgtacttgcctcgctgatgttgtaatgataagacaaagctggttgggacttaacattctgcagggcgcttggcgcactaggagctgacggagggatctgagggcgcatagcgtagtatgagccggtcatggagtcgcctggggcagtgcttgttctcggaaacgcaggccgatctggacctcccggatcggcagctgcttggccgtagcctgttttagacaacatctcaacggtttcctcaatgtctcgctgcaaatcccacgaggtaggtttgtaggccgtgtacctctgattggtgtctgtgctgtggctcggtgggccttgactcggcggactcttgctttgggggcgggatttcgtgagcacagggcgtcctcgggcaggctgaagaaccgacggaacatgagtgagccctgaagcgttgcccggttgtggaggcgaggaagtattctctttcctcaatccatatccaggaacgggtggtgtgctttcgtcatccactggctgcttcagtgaaaccattggcgctgacaaggcggcgggaatctcgggccgtctccaattggatggcggtggtcctgcgagcgagtgtctcttattttctccgaccggagcctgtctgggagcttcctcggcaacggtgttgatggttggattccacggccggtattgtccctgatacggatctcttgctgaattctgctgtgtggcggtcggagccggctgaggcatcgagttctggcggagaggaggccggtgaggatctgaagatgcttgctggttgttgaggctcggagatccggacgacagtgttttttgctctgtgctacctaatcgatgcattcgacttgggggtatcgcttccgaatgcaactccgaaggggccagaggaaaggcgttggcataaatcagtggcgggccagtatccatcatgatatcgttgcctggcaattcgaccggcgtggggtttatatcctcgtgacattgcccagtcaattcgctgggaagctcggccacgaacccaaccggcgtgtatgcaacctggcgactgtcgagtaacgggattgcgtcaactacaggggcactttctccatggacttccgaaatttgcacactgtcgatctcttgggttgtacgagcaggtgggctttgaacaggaggtcgactttcatgcgcaggttgggctatgactggcgggctctcaattacattgtaactttcgatcaaaggctgactctgagttacaggcgggctctcgataacaggtgggctttcgatgacagggaggctttggacaacgagtggagtagtttcggcgcttacaaccggtgatatattcgattgctgcggtaatacctctgaggtcggtggcggagctggcgaccgagttggaactggcgctgaagtcggctttggaggatttgtctggccagtttcagagtctttctttggcggtagatcatcctcatcttcctgcagtggacttatgtcatcgtaagctcccggtcccatgtacatgaagatatcaggctggaaccaaggagcgctggaaccatcttcgtcctcggcaatcgtagcctttgccagggtgctttttgctttcgcagtagaggtcctctcgccgacggtactcctccttttgacttgtaactggctcacaagtctttcctcgggctccaggtcgatgggggcgctatcgtctatgctttggggaaactcgtcgccaggctggggaaaatgaaactgggtaatccccgtgggtttgtagcggtagaaccatctttgactctctccatcgtaatcccactcccaattttcgggaagcgcagacatgatggtcttcgcgttggttgagaatacaactcgatcttcgaatcgcgtgtttatgatcggtgtgcgcccagccagagccttgtctatagctcgatccgatgccagtaccgagttaaccccgcaggagaagggttgtcaaaaaggtgtttgggagctgtctctacctgaagaaacccatggtgtatcttggtgtctcaggactgagagggcagaaaaaaagacgggagcctgacaacttgtcaggtagatgaaaagaaaagcgtaagaggggacagtaagcggtaagtaataaattcctagcgggagaactcgacgccgtgcgcgcttccaggcctggtgccagcaagcagaatatcagcacgctttcctcttaacagcatggggtggctggacgatgcccaatgaaagggactgaggcttaggcagtccgacataaattgatcaaacatgcccaacaaaagtcccaggttggctgtccacccaagcattcagcctcagtactagtgcatcgagctgaggctggctctctgttggcgccaactcacgccgatattttcaacttgagccgaatcgagctttgaagaggcctgcccttattactctgtacttcatcaagcattggtattgagaagagtgcggcatttcggcttccccgcacttactgaggttccaatgtgatgccaagcatcgctcacgcatgagtaggagcatggaggagggaaaagatgctgtttgagggaaatacgtgagtaaataggcccaagaatatagaaagatcatgtgttgagactgataccacgataggtcgaataatcgatagctggataactccgtagatgatcatgcaataaattcagatgagcttttggcaggcagtggcaggcagtggcaggcagtggcaggcacagaatgttaaaagggcgggggacacttggccctggctctctgccaggggtgcctgaagggtccaccacattgacgtcacagccaagagataagatggggcaggcaggacgatcgctggtccacctcatcccaatactgcaattcaacgcgttcgaaaactccatcttctcctcttccatgcatcgggagagatgaacttttcttgtgaaaccggcatcttgcagacggccaagacacgatggagggtccaccccaaccacagggaaccacgacaccccgatcaacggtccctgagtttccccctgggtggccacagatcgcttcaagatattgacagatatcgacaagatgagatgaatgtatctgaaagccacctggaagtgctggaccacggctggtggggttgaaacccagttgatgacaatcaaggcttgggctaatggctctgttggcgtcggtagaacccaagaaagcgttcagccatgcggcaatacgcaaccgacggagccagcactactacctcccattccatgacaagacctggttggcgtcgtcccacaactgctgtggatcgcttgtgttgatctgtcggactgtttgaagccccgagtgaaaacccttgaagtacacaagccgtctgtccacatccccagttttccagcttttctttttgactcgatttccatggactggacattagagcaccaaaaccgaccttatactttcattcatccacgctcaatgcaccatcatgcgctcctcggaggagggcatgcccgaactgggctcagagggacgaccgacccttcgtgttcagatgccgtcttactcagaaatgagctcaaacagtgaaaagcccaagggcactcttgatcccgaccatttggctcccgaaacggcacccctcagccccgccgagtctagagaagtcgccaacagacttaacgacgacctcgagcttctccgtgtcgaacgtattgtctctcatcagcaacaaaacgacgcccgttcgagaaaccgaagtcaccatgagcgtcccgaccaggtcgaagatgccttcaactcagccacgcctgctcccatcaccgccaggactccggagaaaaagtcgacctggcttacacgactttgggtttcgttgaagagattccctcgcgttcttcgctacgttgtctacgccatcccagccggcatcctcattctgataccagtcttcttggacttgtttgcctatgacggcaatagcgaaccagttggtggtgagggaggtgttcagctgctctggtttggaatctggcttgaggtggtctggttatcgctatgggctggtcgcattctcacctccatcattcctgccaccgttgccttcattgcagataccgtcggatcaagcaaccacaagaagtggcgggatattggacgccaaatggagtttccgactgcccttttcgtttggatgctggccgtcttggtgtcatacaagcctatattgaatcaccgagtcattaatgatcccgacaatgacggcagcataccctatgtcacctgggtcgatgttctttacaagatcatcatagccttgtttgtgctggcaacgctcaatgtggccgagaagattctgattcagtggatcgcagcttcgttccacctgcgtacctactcgcaccgcattcgggaaaaccagatgcaaatcgactgccttatcactctttactcgtacgccaaaacccggctggaagaacaagacccggtctgggatcccaacagtgacaggaacaactcttctgggagccgaacaccgatgaaggccatccattccaatgcccgtcaggcttggaacaaggtgggcaacgccgccagtcgcatggctggtgactttaccgggcgaaaggttgccaagaacaatcacaagagagttgtgttggagctgctccgagagacagcatcgagttacacactcgcccgcgtcttttaccgtacttttgttcgtccggaccacaacactatcacggtagatgatctcctgccagcattcccaactcctgaggaggctgagttatgcttcaacgtctttgacaaagatctcaatggtgacatttcgatggaggagcttgagatggtttgcaacgagatccacctggagaagaaggcgattgccgcctctttgaaggatctggactctgtcatcaagaagctggacgaagtgttcatgtttcttgttgcggttattgtcatcattgtgtttatcagcatcatctccaactcggccgctgcagcgctcacctcgacgggtacggttatactgggtttgtcgtggcttcttcaggccaccgctcaggaatttcttcaggtatgttcaaccgcaatcgtttaagataccgtgtatgctgacggattctagtccatcatcttcgtctttgtcaaacaccccttcgacgtcggtgaccgcgtcaccatctacggcaataccggctccatgatgcgaggtgatgactactacgtcatcgagatctcccttctctacaccgagttcaagaaaatggaaggtcatgtcgtgcaagcgcccaactcgctgctcaacaacctcttcatcctcaaccagcgccgcagtcaaggtctcgccgacccgatcaatctcaagctccgcttcggcacgacagaagcccaaatcgaggagctcaagtccagaatgctggaattttgcctccagaacaagcgtgattatgccccgaggattatctctgaagttcagaccattgacgaggttgcctcgatcaccatgaacatcatctttttccacaagagcaactaccaaaacgagctcctccgtctcacacgccacaaccgttttgccgtcgagctcatgaggcagatgcacgacatgggtctggagacgcctcgtcttgttgcgcctggtggtgggagggacatgcctatgtattgggcttcgatcccaccccctgggtactcccagcgggatcatgggcctgacaacacacctggaactactggcgaacccgtcacggccgtgcctcttcccagcccgaacgcagcagcaaggaggagggccaacagccgtgccgcggttgtggaggcggggatggattttcaggatgtgtatcacagccggaagagggataattccgtgacgaggctggcgtcgattagtcagtcgccgagggaggatgaggaggaggagaataatggggatggggcctctcgggcgggggtgagtattgatcagcatctggagaaggttgcgagtagggatagtgcttcaactcggagagggaagttgtggcctatgaggtcggtaagtagggctgggagtgggcagcatcattctcggtatcaggggagtggggggagtggtgcaccgggagcgattgtttaagtgtagggagggtttaatgatgggcttatgggaagggattttggctgttgaaggcggatacccgggaggcaaggcaacattttttacgttcatttttttcgcatttgcagacacacacacacatttttacatactgggcctgtggccgcataggtatattttgggctttttaacattttctagatacctacagcagagtttccatttttgtcacgcatatcaaatagggaatgagttctcagcaacaacattaatgcctctggccgataaaatattgatacagcaaattgtcccttttttttttaaaaaaaaaaaaaaaagaagtaacatacataaccctcaggcatcgttcatgtagggttgatgatgcaagtctaacccaacaacggaccttcagtctgccacctgagcagcttcttatgtgactgtctcgcattaatgaatcctgaatgggtgtagagatctgtactctgactgggcacacagacttttgctgacaagggctcagtcccgtcgggtagccagcgcatacacgtatatttcagctgagcctcgccccctttataaaggcaggagttttctagaaagtataacactcatcacgcccactcccaggcctaaaacatgacaaccattactgaatcattctcaaaatggccaacaacctagactcgaatgtcctcgccaattggtcgctttccaagatcaatttcactgttgattgtaaaggcgcagccaagtttgccgcgcttctgttgatggaggaggacacaaagacgtatatagggaatcttaccagtttccatacgatgcattcatcaacatgatgcagaatattgcgccggacccttttgtcaatatttcccgagggatgattctgaactgggtgtctacgatgtacgaaaacacgacctgggatacatatagcgtgataagccctatcatccgtaggtgacgaatgcagttctgtcggagccaaccgtggcagggtaatcccgatctggatggcataggggtgagtcgatgagactactaaagttcattaccctatctaagagtagaaggctgatgataaatgtggcgcaggtctttagttcatacgtcgttcaagtctcactcgccacaatatatattcttactcttgggattcatgcaactatcccaattttggatcatgaaacgcagcaccccgagggtgttttctttcaatgatagaaaggcatgaaatgctcttcagacgagcgcatccatgttctgggactctacagcacttttcagcatcaccattgccgccgtctccgctcttgtcaccacaagtacctcgatatccatctacaacgccctctttgtaaggacgtcagtcaacctgacatgttcagttcttgcccttgtctggccgttgtcctaccgcattttccggtatgtatagattcgacggatactgtttgtgttgttgtgtgtggttttcgtacccgtcattcttccccatgacacccgtgacggtttgaccaccccttttgaatatcattgcttgggtccattacctgatgacatggaagttttactatagggatggcaactcgtggcttggtgtcataggatcttttgttcaaattccactggtggtgtttgctgagttggtcactggactgagggctgctgcgaagggcagttttcagcacttgccgaagtcgaaaacacgaaccttaatgacatcagtactcggaagaaggttgtccgggttgattacaactggtaccataggtaaaggtttgcagaggattgatactccaaggggaagatttgcattgagatttatctggtacctttggttttttgtgacgatgtggatcaacttggcccactacattattctgagaaacgcggtatcggatatggctggagaaacattacaggagaatgcatgggattccggtcaagtgatgacgctatcgacttggcttccaacggtgattgattttgctttggtgtttagaggtaagcccctacatcatacaccttatgcatatatacaccttttctgactgagcacatcatcatgggaaacctcaaagcccttgcttaccggctgccccttggagtgaatattcagaccgctggagaggatgtggaattctatttgatgggcgttcattctgttgtcgacggcatgcgaccttggagttgaaaccaacatctatcaacttgaggcctgtgggctcaggacggaagtcctaagagcaacctgacccgcctgaccgacagggagcaacttcatttctcacagtctcttctggagcaggaatggagcttcgggcaggttatggcactggcaacttggattcctacatttctggatttcaccctgatattcaaaggtaatattccaccaagagacatgttttttttttggcatgaaagcctggactaactgggtgacttggactggtagggaacctcagggctctagtgtaccgactcccacttggagtaagtattcaagtttgatggccagaaggatcacaccgggtcaaccgtggcattgctggagacaaatttggacaaaaacggggctccctggaaaagaagaagctcggtatgatttctggtgaaaagggcggggctcgcaacggtgagcggtgccaaatatctacgctttgttacaaaacacgggcctggaaaaagtacaggtacctgttagggcacgaccaaaatactgaaattgtcatttctccctgccaacttccgaggctatcacctatctctaagcccagagtcgagtctatggtgccagtcatacgtctcgg
